(19) United States
(12) Patent Application Publication
(10) Pub. No.: US 2024/0245805 A1
(43) Pub. Date: Jul. 25, 2024

(54) CIRCULAR RNA COMPOSITIONS AND METHODS

(71) Applicant: Orna Therapeutics, Inc., Cambridge, MA (US)

(72) Inventors: Robert Alexander Wesselhoeft, Cambridge, MA (US); Brian Goodman, Cambridge, MA (US)

(21) Appl. No.: 17/996,074

(22) PCT Filed: Mar. 22, 2021
(86) PCT No.: PCT/US2021/023540

§ 371 Date: Oct. 12, 2022

Related U.S. Application Data
(60) Provisional application No. 62/992,518, filed on Mar. 20, 2020.

(51) Int. Cl. A61K 48/00; A61K 39/00; A61K 47/69; A61P 35/00; C12N 15/85

(52) U.S. Cl. CPC A61K 48/0066; A61K 39/4611; A61K 39/4631; A61K 39/464412; A61K 47/6929; A61P 35/00; C12N 15/85

(57) ABSTRACT

Circular RNA, along with related compositions and methods are described herein. In some embodiments, the inventive circular RNA comprises post splicing group I in iron fragments, spacers, an IRES, optional duplex forming regions, and more than one expression sequence. In some embodiments, the expression sequences are separated by one or more polynucleotide sequences encoding a cleavage site. In some embodiments, circular RNA of the invention has improved expression, functional stability, immunogenicity, ease of manufacturing, and/or half-life when compared to linear RNA. In some embodiments, inventive methods and constructs result in improved circularization efficiency, splicing efficiency, and/or purity when compared to existing RNA circularization approaches.

### CROSS REFERENCE TO RELATED APPLICATIONS

[0001] This application is a national stage application of International Application No. PCT/US2021/023540, filed on Mar. 22, 2021, which claims the benefit of, and priority to, U.S. Provisional Application No. 62/992,518, filed on Mar. 20, 2020, the contents of which are hereby incorporated by reference in entirety for all purposes.

### SEQUENCE LISTING

[0002] The instant application contains a Sequence Listing which has been submitted electronically in ASCII format and is hereby incorporated by reference in its entirety. Said ASCII copy, created on Jun. 20, 2023, is named OBS-015WOUS_SL.txt and is 741,048 bytes in size.

### BACKGROUND

[0003] Conventional gene therapy involves the use of DNA for insertion of desired genetic information into host cells. The DNA introduced into the cell is usually integrated to a certain extent into the genome of one or more transfected cells, allowing for long-lasting action of the introduced genetic material in the host. While there may be substantial benefits to such sustained action, integration of exogenous DNA into a host genome may also have many deleterious effects. For example, it is possible that the introduced DNA will be inserted into an intact gene, resulting in a mutation which impedes or even totally eliminates the function of the endogenous gene. Thus, gene therapy with DNA may result in the impairment of a vital genetic function in the treated host, such as e.g., elimination or deleteriously reduced production of an essential enzyme or interruption of a gene critical for the regulation of cell growth, resulting in unregulated or cancerous cell proliferation. In addition, with conventional DNA based gene therapy it is necessary for effective expression of the desired gene product to include a strong promoter sequence, which again may lead to undesirable changes in the regulation of normal gene expression in the cell. It is also possible that the DNA based genetic material will result in the induction of undesired anti-DNA antibodies, which in turn, may trigger a possibly fatal immune response. Gene therapy approaches using viral vectors can also result in an adverse immune response. In some circumstances, the viral vector may even integrate into the host genome. In addition, production of clinical grade viral vectors is also expensive and time consuming. Targeting delivery of the introduced genetic material using viral vectors can also be difficult to control. Thus, while DNA based gene therapy has been evaluated for delivery of secreted proteins using viral vectors (U.S. Pat. No. 6,066,626; U.S. Publication No. US2004/0110709), these approaches may be limited for these various reasons.

[0004] In contrast to DNA, the use of RNA as a gene therapy agent is substantially safer because RNA does not involve the risk of being stably integrated into the genome of the transfected cell, thus eliminating the concern that the introduced genetic material will disrupt the normal functioning of an essential gene, or cause a mutation that results in deleterious or oncogenic effects, and extraneous promoter sequences are not required for effective translation of the encoded protein, again avoiding possible deleterious side effects. In addition, it is not necessary for mRNA to enter the nucleus to perform its function, while DNA must overcome this major barrier.

[0005] Circular RNA is useful in the design and production of stable forms of RNA. The circularization of an RNA molecule provides an advantage to the study of RNA structure and function, especially in the case of molecules that are prone to folding in an inactive conformation (Wang and Ruffner, 1998). Circular RNA can also be particularly interesting and useful for in vivo applications, especially in the research area of RNA-based control of gene expression and therapeutics, including protein replacement therapy and vaccination.

[0006] Prior to this invention, there were three main techniques for making circularized RNA in vitro: the splint-mediated method, the permuted intron-exon method, and the RNA ligase-mediated method. However, the existing methodologies are limited by the size of RNA that can be circularized, thus limiting their therapeutic application.

### SUMMARY

[0007] Circular RNA, along with related compositions and methods are described herein. In some embodiments, the inventive circular RNA comprises post splicing group I intron fragments, spacers, an IRES, optional duplex forming regions, and more than one expression sequence. In some embodiments, the inventive circular RNA comprises duplex forming regions. In some embodiments, the expression sequences are separated by one or more polynucleotide sequences encoding a cleavage site. In some embodiments, a cleavage site is a self-cleaving peptide. In some embodiments, the self-cleaving peptide is a 2A self-cleaving peptide. In some embodiments, the first and second expression sequences are separated by ribosomal skipping element. In some embodiments, each expression sequence encodes a therapeutic protein. In some embodiments, the first expression sequence encodes a cytokine or a functional fragment thereof. In some embodiments, the first expression sequence encodes a transcription factor. In some embodiments, the first expression encodes an immune checkpoint inhibitor. In some embodiments, the first expression sequence encodes for a chimeric antigen receptor. In some embodiments, the first expression sequence encodes a first T-cell receptor (TCR) chain, and the second expression encodes a second TCR chain. In some embodiments, circular RNA of the invention has improved expression, functional stability, ease of manufacturing, and/or half-life when compared to linear RNA. In some embodiments, circular RNA of the invention has reduced immunogenicity. In some embodiments, inventive methods and constructs result in improved circularization efficiency, splicing efficiency, and/or purity when compared to existing RNA circularization approaches.

[0008] In some embodiments, the circular RNA polynucleotide comprises one or more microRNA binding sites. The microRNA binding site is recognized by a microRNA expressed in the liver. In some embodiments, the microRNA binding site is recognized by miR-122.

[0009] One aspect of the present application provides a circular RNA polynucleotide comprising, in the following order, a post splicing 3′ group I intron fragment, an Internal Ribosome Entry Site (IRES), a first expression sequence, a second expression sequence, and a post splicing 5′ group I intron fragment.

[0010] In some embodiments, the circular RNA polynucleotide comprises a polynucleotide sequence encoding a cleavage site between the first expression sequence and the second expression sequence. In some embodiments, the cleavage site is a self-cleaving spacer. In some embodiments, the self-cleaving spacer is a 2A self-cleaving peptide.

[0011] In some embodiments, the circular RNA polynucleotide comprises a second IRES between the first expression sequence and the second expression sequence. In some embodiments, the first IRES consists of or comprises a sequence according to any of SEQ ID NO: 1-72. In some embodiments, the second IRES consists of or comprises a sequence according to any of SEQ ID NO: 1-72.

[0012] In some embodiments, the first expression sequence encodes a first therapeutic protein, and the second expression sequence encodes a second therapeutic protein. In some embodiments, the first expression sequence or the second expression sequence encodes an antibody. In some embodiments, the first expression sequence or the second expression sequence encodes a chimeric antigen receptor. In some embodiments, the first expression sequence or the second expression sequence encodes a transcription factor. In some embodiments, wherein the first expression sequence or the second expression sequence encodes a cytokine. In some embodiments, wherein the first expression sequence or the second expression sequence encodes an immune inhibitory molecule. In some embodiments, the first expression sequence or the second expression sequence encodes an agonist of a costimulatory molecule. In some embodiments, wherein the first expression sequence or the second expression sequence encodes an inhibitor of an immune checkpoint molecule. In some embodiments, wherein the first expression sequence encodes the alpha chain of a T cell receptor (TCR) and the second expression sequence encodes the beta chain of a T cell receptor (TCR).

[0013] In some embodiments, the first expression sequence encodes the beta chain of a T cell receptor (TCR) and the second expression sequence encodes the alpha chain of a T cell receptor (TCR). In some embodiments, the first expression sequence encodes the gamma chain of a T cell receptor (TCR) and the second expression sequence encodes the delta chain of a T cell receptor (TCR). In some embodiments, the first expression sequence encodes the delta chain of a T cell receptor (TCR) and the second expression sequence encodes the gamma chain of a T cell receptor (TCR). In some embodiments, the first expression sequence encodes a T cell receptor (TCR) and the second expression sequence encodes a chemokine. In some embodiments, the first expression sequence encodes for a chemokine and the second expression sequence encodes for a T cell receptor (TCR). In some embodiments, the first expression sequence encodes a chimeric antigen receptor (CAR) and the second expression sequence encodes a PD1 or PDL1 antagonist. In some embodiments, the first expression sequence encodes a PD1 or PDL1 antagonist and the second expression sequence encodes a chimeric antigen receptor (CAR). In some embodiments, the first expression sequence encodes for a chimeric antigen receptor (CAR), and the second expression sequence encodes a chemokine. In some embodiments, the first expression sequence encodes for a chemokine, and the second expression sequence encodes for a chimeric antigen receptor (CAR). In some embodiments, the first expression sequence encodes a transcription factor and the second expression sequence encodes a cytokine.

[0014] In some embodiments, the first expression sequence encodes a T cell receptor (TCR) and the second expression sequence encodes a cytokine. In some embodiments, the first expression sequence encodes a cytokine and the second expression sequence encodes a T cell receptor (TCR). In some embodiments, the cytokine is selected from IL-2, IL-7, IL-12, and IL-15.

[0015] In some embodiments, the first expression sequence encodes for a T cell receptor (TCR) and the second expression sequence encodes for a transcription factor. In some embodiments, the first expression sequence encodes for a transcription factor and the second expression sequence encodes for a T cell receptor (TCR). In some embodiments, the transcription factor is selected from FOXP3, STAT5B, HELIOS, Tbet, GATA3, RORgt, and cd25.

[0016] In some embodiments, the first expression sequence encodes a chimeric antigen receptor (CAR) and the second expression sequence encodes a cytokine. In some embodiments, the first expression sequence encodes a cytokine and the second expression sequence encodes a chimeric antigen receptor (CAR). In some embodiments, the cytokine is selected from IL-2, IL-7, IL-12, and IL-15.

[0017] In some embodiments, the first expression sequence encodes a cytokine and the second expression sequence encodes a transcription factor. In some embodiments, the transcription factor is selected from FOXP3, STAT5B, HELIOS, Tbet, GATA3, RORgt, and cd25. In some embodiments, the cytokine is selected from IL-10, IL-12, and TGFβ.

[0018] In some embodiments, the first expression sequence encodes a transcription factor and the second expression sequence encodes a chemokine. In some embodiments, the first expression sequence encodes a chemokine and the second expression sequence encodes a transcription factor. In some embodiments, the transcription factor is selected from FOXP3, STAT5B, and HELIOS. In some embodiments, the chemokine is a CC chemokine, CXC chemokine, C chemokine, or a CX3C chemokine. In some embodiments, the chemokine is selected from CCL1, CCL2, CCL3, CCL4, CCL5, CCL6, CCL7, CCL8, CCL9/CCL10, CCL11, CCL12, CCL13, CCL14, CCL15, CCL16, CCL17, CCL18, CCL19, CCL20, CCL21, CCL22, CCL23, CCL24, CCL25, CCL26, CCL27, CCL28, CXCL 1, CXCL2, CXCL3, CXCL4, CXCL5, CXLC6, CXCL7, CXCL8, CXCL9, CXCL10, CXCL11, CXCL12, CXCL13, CXCL14, CXCL15, CXCL16, CXCL17, XCL1, XCL2, and CX3CL1.

[0019] In some embodiments, the first expression sequence encodes a tumor antigen and the second expression sequence encodes a cytokine. In some embodiments, the first expression sequence encodes a cytokine and the second expression sequence encodes a tumor antigen. In some embodiments, the antigen is a neoantigen. In some embodiments, the cytokine is IFNγ.

[0020] In some embodiments, the first expression sequence encodes a CAR and the second expression sequence encodes a CAR.

[0021] In some embodiments, the first expression sequence encodes a cytokine and the second expression sequence encodes a cytokine. In some embodiments, the first or second expression sequence encodes a cytokine selected from IL-10, TGFβ, and IL-35. In some embodiments, the first or second expression sequence encodes a cytokine selected from IFNγ, IL-2, IL-7, IL-15, and IL-18.

[0022] In some embodiments, the first expression sequence encodes a T cell receptor (TCR) and the second expression sequence encodes a T cell receptor (TCR). In some embodiments, the first expression sequence encodes for a chemokine and the second expression sequence encodes for a chemokine. In some embodiments, the first or second expression sequence encodes for an immunosuppressive enzyme. In some embodiments, the first expression sequence encodes a rate limiting enzyme and the second expression sequence encodes a flux-limiting enzyme. In some embodiments, the first expression sequence encodes a flux-limiting enzyme and the second expression sequence encodes a rate limiting enzyme.

[0023] In some embodiments, the first expression sequence encodes a transcription factor and the second expression sequence encodes a survival factor. In some embodiments, the first expression sequence encodes a survival factor and the second expression sequence encodes a transcription factor. In some embodiments, the transcription factor is selected from FOXP3, STAT5B, HELIOS, Tbet, GATA3, RORgt, and cd25. In some embodiments, the survival factor is selected from BCL-XL.

[0024] In some embodiments, the first or second expression sequence encodes for a chaperone protein or complex. In some embodiments, the first expression sequence encodes a transcription factor and the second expression sequence encodes a chaperone protein or complex. In some embodiments, the first expression sequence encodes a chaperone protein or complex and the second expression sequence encodes for a transcription factor. In some embodiments, the chaperone protein or complex is selected from Skp, Spy, FkpA, SurA, Hsp60, Hsp70, GroEL, GroES, Hsp90, HtpG, Hsp100, ClpA, ClpX, ClpP, and Hsp104. In some embodiments, the transcription factor is selected from FOXP3, STAT5B, HELIOS, Tbet, GATA3, RORgt, and cd25.

[0025] In some embodiments, one or both expression sequences encode a signaling protein.

[0026] In some embodiments, the first expression sequence encodes for an enzyme and the second expression encodes for the first expression sequence's negative regulatory inhibitor. In some embodiments, the first expression sequence encodes for a negative regulatory inhibitor protein of an enzyme encoded in the second expression sequence. In some embodiments, the negative regulatory inhibitor is selected from a p57kip2, BAX inhibitor, and TIPE2.

[0027] In some embodiments, the first expression sequence encodes a dominant negative protein and the second expression sequence encodes an immune protein. In some embodiments, the first expression sequence encodes an immune protein and the second expression sequence encodes a dominant negative protein. In some embodiments, the first or second expression sequence encodes for an anti-inflammatory protein.

[0028] In some embodiments, the first expression sequence encodes a transcription factor and the second expression sequence is capable of converting 5-fluorocytosinde (5-FC) into 5-fluorouracil (5-FU). In some embodiments, the first expression sequence is capable of converting 5-fluorocytosinde (5-FC) into 5-fluorouracil (5-FU) and the second expression sequence is a transcription factor. In some embodiments, wherein the expression sequence capable of converting 5-fluorocytosinde (5-FC) into 5-fluorouracil (5-FU) is cytosine deaminase.

[0029] In some embodiments, the circular RNA polynucleotide comprises a first spacer between the 5′ duplex forming region and the post splicing 3′ group I intron fragment, and a second spacer between the post splicing 5′ group I intron fragment and the 3′ duplex forming region. In some embodiments, the first and second spacers each have a length of about 10 to about 60 nucleotides. In some embodiments, the first and second duplex forming regions each have a length of about 9 to about 19 nucleotides. In some embodiments, the first and second duplex forming regions each have a length of about 30 nucleotides. In some embodiments, the IRES has a sequence of an IRES from Taura syndrome virus, Triatoma virus, Theiler's encephalomyelitis virus, Simian Virus 40, Solenopsis invicta virus 1, Rhopalosiphum padi virus, Reticuloendotheliosis virus, Human poliovirus 1, Plautia stali intestine virus, Kashmir bee virus, Human rhinovirus 2, Homalodisca coagulata virus-1, Human Immunodeficiency Virus type 1, Homalodisca coagulata virus-1, Himetobi P virus, Hepatitis C virus, Hepatitis A virus, Hepatitis GB virus, Foot and mouth disease virus, Human enterovirus 71, Equine rhinitis virus, Ectropis obliqua picorna-like virus, Encephalomyocarditis virus, Drosophila C Virus, Human coxsackievirus B3, Crucifer tobamovirus, Cricket paralysis virus, Bovine viral diarrhea virus 1, Black Queen Cell Virus, Aphid lethal paralysis virus, Avian encephalomyelitis virus, Acute bee paralysis virus, Hibiscus chlorotic ringspot virus, Classical swine fever virus, Human FGF2, Human SFTPA1, Human AML1/RUNX1, Drosophila antennapedia, Human AQP4, Human AT1R, Human BAG-1, Human BCL2, Human BiP, Human c-IAPl, Human c-myc, Human eIF4G, Mouse NDST4L, Human LEF1, Mouse HIF1 alpha, Human n.myc, Mouse Gtx, Human p27kip1, Human PDGF2/c-sis, Human p53, Human Pim-1, Mouse Rbm3, Drosophila reaper, Canine Scamper, Drosophila Ubx, Human UNR, Mouse UtrA, Human VEGF-A, Human XIAP, Drosophila hairless, S. cerevisiae TFIID, S. cerevisiae YAP1, tobacco etch virus, turnip crinkle virus, EMCV-A, EMCV-B, EMCV-Bf, EMCV-Cf, EMCV pEC9, Picobirnavirus, HCV QC64, Human Cosavirus E/D, Human Cosavirus F, Human Cosavirus JMY, Rhinovirus NAT001, HRV14, HRV89, HRVC-02, HRV-A21, Salivirus A SH1, Salivirus FHB, Salivirus NG-J1, Human Parechovirus 1, Crohivirus B, Yc-3, Rosavirus M-7, Shanbavirus A, Pasivirus A, Pasivirus A 2, Echovirus E14, Human Parechovirus 5, Aichi Virus, Hepatitis A Virus HA16, Phopivirus, CVA10, Enterovirus C, Enterovirus D, Enterovirus J, Human Pegivirus 2, GBV-C GT110, GBV-C K1737, GBV-C Iowa, Pegivirus A 1220, Pasivirus A 3, Sapelovirus, Rosavirus B, Bakunsa Virus, Tremovirus A, Swine Pasivirus 1, PLV-CHN, Pasivirus A, Sicinivirus, Hepacivirus K, Hepacivirus A, BVDV1, Border Disease Virus, BVDV2, CSFV-PK15C, SF573 Dicistrovirus, Hubei Picorna-like Virus, CRPV, Salivirus A BN5, Salivirus A BN2, Salivirus A 02394, Salivirus A GUT, Salivirus A CH, Salivirus A SZ1, Salivirus FHB, CVB3, CVB1, Echovirus 7, CVB5, EVA71, CVA3, CVA12, EV24 or an aptamer to eIF4G.

[0030] In some embodiments, the circular RNA polynucleotide comprises natural nucleotides. In some embodiments, the circular RNA polynucleotide consists of natural nucleotides. In some embodiments, the expression sequence is codon optimized.

[0031] In some embodiments, the circular RNA polynucleotide is optimized to lack at least one microRNA binding site present in an equivalent pre-optimized polynucleotide. In some embodiments, the circular RNA polynucleotide is optimized to lack at least one endonuclease susceptible site present in an equivalent pre-optimized polynucleotide. In some embodiments, the circular RNA polynucleotide is optimized to lack at least one RNA-editing susceptible site present in an equivalent pre-optimized polynucleotide.

[0032] In some embodiments, the circular RNA polynucleotide of any one of the preceding claims, wherein the circular RNA polynucleotide is from about 100 nucleotides to about 15 kilobases in length.

[0033] In some embodiments, the circular RNA polynucleotide of has an in vivo duration of therapeutic effect in humans of at least about 20 hours. In some embodiments, the circular RNA polynucleotide of has a functional half-life of at least about 20 hours. In some embodiments, the circular RNA polynucleotide of has a duration of therapeutic effect in a human cell greater than or equal to that of an equivalent linear RNA polynucleotide comprising the same expression sequence. In some embodiments, the circular RNA polynucleotide of has a functional half-life in a human cell greater than or equal to that of an equivalent linear RNA polynucleotide comprising the same expression sequence. In some embodiments, the circular RNA polynucleotide of has an in vivo duration of therapeutic effect in humans greater than that of an equivalent linear RNA polynucleotide having the same expression sequence. In some embodiments, the circular RNA polynucleotide of has an in vivo functional half-life in humans greater than that of an equivalent linear RNA polynucleotide having the same expression sequence.

[0034] In another aspect, the present application provides a pharmaceutical composition comprising a circular RNA polynucleotide as described herein, a nanoparticle, and optionally, a targeting moiety operably connected to the nanoparticle. In some embodiments, the nanoparticle is a lipid nanoparticle, a core-shell nanoparticle, a biodegradable nanoparticle, a biodegradable lipid nanoparticle, a polymer nanoparticle, or a biodegradable polymer nanoparticle.

[0035] In some embodiments, the pharmaceutical composition comprises a targeting moiety, wherein the targeting moiety mediates receptor-mediated endocytosis or direct fusion into selected cells of a selected cell population or tissue in the absence of cell isolation or purification. In some embodiments, the pharmaceutical composition comprises a targeting moiety operably connected to the nanoparticle. In some embodiments, the targeting moiety is a scFv, nanobody, peptide, minibody, polynucleotide aptamer, heavy chain variable region, light chain variable region or fragment thereof.

[0036] In some embodiments, the pharmaceutical composition comprises less than 1%, by weight, of the polynucleotides in the composition that are double stranded RNA, DNA splints, or triphosphorylated RNA. In some embodiments, the pharmaceutical composition comprises less than 1%, by weight, of the polynucleotides and proteins in the pharmaceutical composition that are double stranded RNA, DNA splints, triphosphorylated RNA, phosphatase proteins, protein ligases, and capping enzymes.

[0037] In another aspect, the present application provides a method of treating a subject in need thereof comprising administering a therapeutically effective amount of a composition comprising the circular RNA polynucleotide described herein, a nanoparticle, and optionally, a targeting moiety operably connected to the nanoparticle.

[0038] In some embodiments, the composition comprises a targeting moiety, wherein the targeting moiety mediates receptor-mediated endocytosis selectively into cells of a selected cell population in the absence of cell selection or purification. In some embodiments, the targeting moiety is an scFv, nanobody, peptide, minibody, heavy chain variable region, light chain variable region or fragment thereof. In some embodiments, the nanoparticle is a lipid nanoparticle, a core-shell nanoparticle, or a biodegradable nanoparticle.

[0039] In some embodiments, the nanoparticle comprises one or more cationic lipids, ionizable lipids, or poly n-amino esters. In some embodiments, the nanoparticle comprises one or more non-cationic lipids. In some embodiments, the nanoparticle comprises one or more PEG-modified lipids, polyglutamic acid lipids, or hyaluronic acid lipids. In some embodiments, the nanoparticle comprises cholesterol. In some embodiments, the nanoparticle comprises arachidonic acid or oleic acid. In some embodiments, the nanoparticle comprises more than one circular RNA polynucleotide.

[0040] In some embodiments, the subject has a cancer selected from the group consisting of acute lymphocytic leukemia; acute myeloid leukemia (AML); alveolar rhabdomyosarcoma; B cell malignancies; bladder cancer (e.g., bladder carcinoma); bone cancer; brain cancer (e.g., medulloblastoma); breast cancer; cancer of the anus, anal canal, or anorectum; cancer of the eye; cancer of the intrahepatic bile duct; cancer of the joints; cancer of the neck; gallbladder cancer; cancer of the pleura; cancer of the nose, nasal cavity, or middle ear; cancer of the oral cavity; cancer of the vulva; chronic lymphocytic leukemia; chronic myeloid cancer; colon cancer; esophageal cancer, cervical cancer; fibrosarcoma; gastrointestinal carcinoid tumor; head and neck cancer (e.g., head and neck squamous cell carcinoma); Hodgkin lymphoma; hypopharynx cancer; kidney cancer; larynx cancer; leukemia; liquid tumors; liver cancer; lung cancer (e.g., non-small cell lung carcinoma and lung adenocarcinoma); lymphoma; mesothelioma; mastocytoma; melanoma; multiple myeloma; nasopharynx cancer; non-Hodgkin lymphoma; B-chronic lymphocytic leukemia; hairy cell leukemia; acute lymphocytic leukemia (ALL); Burkitt's lymphoma; ovarian cancer; pancreatic cancer; cancer of the peritoneum; cancer of the omentum; mesentery cancer; pharynx cancer; prostate cancer; rectal cancer; renal cancer; skin cancer; small intestine cancer; soft tissue cancer; solid tumors; synovial sarcoma; gastric cancer; testicular cancer; thyroid cancer; and ureter cancer. In some embodiments, the subject has an autoimmune disorder selected from scleroderma, Grave's disease, Crohn's disease, Sjorgen's disease, multiple sclerosis, Hashimoto's disease, psoriasis, myasthenia gravis, autoimmune polyendocrinopathy syndromes, Type I diabetes mellitus (TIDM), autoimmune gastritis, autoimmune uveoretinitis, polymyositis, colitis, thyroiditis, and the generalized autoimmune diseases typified by human Lupus.

[0041] In another aspect, the present application provides a vector for making a circular RNA polynucleotide, comprising, in the following order, a 5′ duplex forming region, a 3′ Group I intron fragment, an Internal Ribosome Entry Site (IRES), a first expression sequence, a second expression sequence, a 5′ Group I intron fragment, and a 3′ duplex forming region.

[0042] In some embodiments, the vector of comprises a polynucleotide sequence encoding a cleavage site between the first expression sequence and the second expression sequence. In some embodiments, the cleavage site is a self-cleaving spacer. In some embodiments, the self-cleaving spacer is a 2A self-cleaving peptide.

[0043] In some embodiments, the vector of comprises a first spacer between the 5′ duplex forming region and the 3′ group I intron fragment, and a second spacer between the 5′ group I intron fragment and the 3′ duplex forming region. In some embodiments, the first and second spacers each have a length of about 5 to about 60 nucleotides. In some embodiments, the first and second spacers each comprise an unstructured region at least 5 nucleotides long. In some embodiments, the first and second spacers each comprise a structured region at least 7 nucleotides long. In some embodiments, the first and second duplex forming regions each have a length of about 9 to 50 nucleotides.

[0044] In some embodiments, the vector is codon optimized. In some embodiments, the vector lacks at least one microRNA binding site present in an equivalent pre-optimization polynucleotide.

[0045] In another aspect, the present application provides a eukaryotic cell comprising a circular RNA polynucleotide as described herein. In some embodiments, the eukaryotic cell is a human cell. In some embodiments, the eukaryotic cell is an immune cell. In some embodiments, the eukaryotic cell is a T cell.

[0046] In an aspect, provided herein is a circular RNA polynucleotide comprising, in the following order, a post splicing 3′ group I intron fragment, an Internal Ribosome Entry Site (IRES), a first expression sequence, a polynucleotide sequence encoding a cleavage site, a second expression sequence, and a post splicing 5′ group I intron fragment. In an aspect, provided herein is a circular RNA polynucleotide comprising, in the following order, a post splicing 3′ group I intron fragment, a first Internal Ribosome Entry Site (IRES), a first expression sequence, a second IRES, a second expression sequence, and a post splicing 5′ group I intron fragment. In some embodiments, the first expression sequence and the second expression sequence encode different therapeutic proteins. In some embodiments, the first expression sequence and the second expression sequence encodes for the same therapeutic protein.

[0047] In an aspect, provided herein is a circular RNA polynucleotide produced from transcription of a vector comprising, in the following order, an optional 5′ duplex forming region, a post splicing 3′ group I intron fragment, an Internal Ribosome Entry Site (IRES), an expression sequence, a polynucleotide sequence encoding a cleavage site, a second expression sequence, a 5′ group I intron fragment, and an optional 3′ duplex forming region. In an aspect, provided herein is a circular RNA polynucleotide produced from transcription of a vector comprising, in the following order, an optional 5′ duplex forming region, a 3′ group I intron fragment, a first Internal Ribosome Entry Site (IRES), an expression sequence, a second IRES, a second expression sequence, a 5′ group I intron fragment, and an optional 3′ duplex forming region. In some embodiments, a circular RNA polynucleotide or vector provided herein comprises 3′ and 5′ duplex forming regions.

[0048] In some embodiments, a circular RNA polynucleotide comprises a first spacer between the 5′ duplex forming region and the post splicing 3′ group I intron fragment, and a second spacer between the post splicing 5′ group I intron fragment and the 3′ duplex forming region. In some embodiments, the first and second spacers each have a length of about 10 to about 60 nucleotides. In certain embodiments, the first and second duplex forming regions each have a length of about 9 to about 19 nucleotides. In certain other embodiments, the first and second duplex forming regions each have a length of about 30 nucleotides.

[0049] In certain embodiments, the IRES is selected from Table 17 has a sequence of an IRES, or is a functional fragment or variant thereof. In some embodiments, the IRES has a sequence of an IRES from Taura syndrome virus, Triatoma virus, Theiler's encephalomyelitis virus, Simian Virus 40, Solenopsis invicta virus 1, Rhopalosiphum padi virus, Reticuloendotheliosis virus, Human poliovirus 1, Plautia stali intestine virus, Kashmir bee virus, Human rhinovirus 2, Homalodisca coagulata virus-1, Human Immunodeficiency Virus type 1, Homalodisca coagulata virus-1, Himetobi P virus, Hepatitis C virus, Hepatitis A virus, Hepatitis GB virus, Foot and mouth disease virus, Human enterovirus 71, Equine rhinitis virus, Ectropis obliqua picorna-like virus, Encephalomyocarditis virus, Drosophila C Virus, Human coxsackievirus B3, Crucifer tobamovirus, Cricket paralysis virus, Bovine viral diarrhea virus 1, Black Queen Cell Virus, Aphid lethal paralysis virus, Avian encephalomyelitis virus, Acute bee paralysis virus, Hibiscus chlorotic ringspot virus, Classical swine fever virus, Human FGF2, Human SFTPA1, Human AML1/RUNX1, Drosophila antennapedia, Human AQP4, Human AT1R, Human BAG-1, Human BCL2, Human BiP, Human c-IAPl, Human c-myc, Human eIF4G, Mouse NDST4L, Human LEF1, Mouse HIF1 alpha, Human n.myc, Mouse Gtx, Human p27kip1, Human PDGF2/c-sis, Human p53, Human Pim-1, Mouse Rbm3, Drosophila reaper, Canine Scamper, Drosophila Ubx, Human UNR, Mouse UtrA, Human VEGF-A, Human XIAP, Drosophila hairless, S. cerevisiae TFIID, S. cerevisiae YAP1, tobacco etch virus, turnip crinkle virus, EMCV-A, EMCV-B, EMCV-Bf, EMCV-Cf, EMCV pEC9, Picobirnavirus, HCV QC64, Human Cosavirus E/D, Human Cosavirus F, Human Cosavirus JMY, Rhinovirus NAT001, HRV14, HRV89, HRVC-02, HRV-A21, Salivirus A SH1, Salivirus FHB, Salivirus NG-J1, Human Parechovirus 1, Crohivirus B, Yc-3, Rosavirus M-7, Shanbavirus A, Pasivirus A, Pasivirus A 2, Echovirus E14, Human Parechovirus 5, Aichi Virus, Hepatitis A Virus HA16, Phopivirus, CVA10, Enterovirus C, Enterovirus D, Enterovirus J, Human Pegivirus 2, GBV-C GT110, GBV-C K1737, GBV-C Iowa, Pegivirus A 1220, Pasivirus A 3, Sapelovirus, Rosavirus B, Bakunsa Virus, Tremovirus A, Swine Pasivirus 1, PLV-CHN, Pasivirus A, Sicinivirus, Hepacivirus K, Hepacivirus A, BVDV1, Border Disease Virus, BVDV2, CSFV-PK15C, SF573 Dicistrovirus, Hubei Picorna-like Virus, CRPV, Salivirus A BN5, Salivirus A BN2, Salivirus A 02394, Salivirus A GUT, Salivirus A CH, Salivirus A SZ1, Salivirus FHB, CVB3, CVB1, Echovirus 7, CVB5, EVA71, CVA3, CVA12, EV24 or an aptamer to eIF4G.

[0050] In some embodiments, the first and second polyA sequences each have a length of 15-50 nt. In some embodiments, the first and second polyA sequences each have a length of about 20-25 nt.

[0051] In certain embodiments, the circular RNA polynucleotide consists of naturally occurring nucleotides. In some embodiments, the circular RNA contains at least about 80%, at least 90%, at least about 95%, or at least about 99% naturally occurring nucleotides. In certain embodiments, the expression sequence is codon-optimized. In certain embodiments, the circular RNA polynucleotide is optimized to lack at least one microRNA binding site present in an equivalent pre-optimized polynucleotide. In certain embodiments, the circular RNA polynucleotide is optimized to lack at least one endonuclease susceptible site present in an equivalent pre-optimized polynucleotide. In certain embodiments, the circular RNA polynucleotide is optimized to lack at least one RNA-editing susceptible site present in an equivalent pre-optimized polynucleotide.

[0052] In some embodiments, the circular RNA polynucleotide is from about 100 nucleotides to about 15 kilobases in length. In certain embodiments, the circular RNA polynucleotide of the present disclosure, has an in vivo duration of therapeutic effect in humans of at least about 20 hours. In certain embodiments, the circular RNA polynucleotide has a functional half-life of at least about 20 hours. In certain embodiments, the circular RNA polynucleotide has a duration of therapeutic effect in a human cell greater than or equal to that of an equivalent linear RNA polynucleotide comprising the same expression sequences. In certain embodiments, the circular RNA polynucleotide has a functional half-life in a human cell greater than or equal to that of an equivalent linear RNA polynucleotide comprising the same expression sequences. In certain embodiments, the circular RNA polynucleotide has an in vivo functional half-life in humans greater than that of an equivalent linear RNA polynucleotide having the same expression sequences. In some embodiments, the reference linear RNA polynucleotide is a linear, unmodified or nucleoside-modified, fully-processed mRNA comprising a cap1 structure and a polyA tail at least 80 nt in length.

[0053] In some embodiments, the pharmaceutical composition has a functional half-life in a human cell greater than or equal that of a pre-determined threshold value. In some embodiments, the pharmaceutical composition has a functional half-life in vivo in humans greater than that of a pre-determined threshold value. In some embodiments, the functional protein assay is an in vitro luciferase assay. In some embodiments, the functional protein assay comprises measuring levels of protein encoded by the expression sequence of the circular RNA polynucleotide in a patient serum or tissue sample. In some embodiments, wherein the pre-determined threshold value is the functional half-life of a reference linear RNA polynucleotide comprising the same expression sequence as the circular RNA polynucleotide. In some embodiments, the pharmaceutical composition has a functional half-life of at least about 20 hours.

[0054] In an aspect, provided herein is a pharmaceutical composition comprising a circular RNA polynucleotide, a nanoparticle, and optionally, a targeting moiety operably connected to the nanoparticle. In some embodiments, the nanoparticle is a lipid nanoparticle, a core-shell nanoparticle, a biodegradable nanoparticle, a biodegradable lipid nanoparticle, a polymer nanoparticle, or a biodegradable polymer nanoparticle. In certain embodiments, the nanoparticle comprises one or more cationic lipids selected from the group C12-200, MC3, DLinDMA, DLinkC2DMA, cKK-E12, ICE (Imidazol-based), HGT5000, HGT5001, DODAC, DDAB, DMRIE, DOSPA, DOGS, DODAP, DODMA and DMDMA, DODAC, DLenDMA, DMRIE, CLinDMA, CpLinDMA, DMOBA, DOcarbDAP, DLinDAP, DLincarbDAP, DLinCDAP, KLin-K-DMA, DLin-K-XTC2-DMA, HGT4003, and combinations thereof.

[0055] In certain embodiments, the pharmaceutical composition comprises a targeting moiety, wherein the targeting moiety mediates receptor-mediated endocytosis or direct fusion into selected cells of a selected cell population or tissue in the absence of cell isolation or purification. In some embodiments, the targeting moiety is a scFv, nanobody, peptide, minibody, polynucleotide aptamer, heavy chain variable region, light chain variable region or fragment thereof. In certain embodiments, the circular RNA polynucleotide is in an amount effective to treat an autoimmune disorder or cancer in a human subject in need thereof. In certain embodiments, the pharmaceutical composition has an enhanced safety profile when compared to a pharmaceutical composition comprising vectors comprising exogenous DNA encoding the same expression sequences.

[0056] In certain embodiments, less than 1%, by weight, of the polynucleotides in the composition are double stranded RNA, DNA splints, or triphosphorylated RNA. In certain embodiments, less than 1%, by weight, of the polynucleotides and proteins in the pharmaceutical composition are double stranded RNA, DNA splints, triphosphorylated RNA, phosphatase proteins, protein ligases, and capping enzymes.

[0057] In an aspect, provided herein is a method of treating a subject in need thereof comprising administering a therapeutically effective amount of a composition comprising the circular RNA polynucleotide, a nanoparticle, and optionally, a targeting moiety operably connected to the nanoparticle. In some embodiments, the subject has an autoimmune disorder or cancer.

[0058] In some embodiments, the targeting moiety is an scFv, nanobody, peptide, minibody, heavy chain variable region, light chain variable region or fragment thereof. In some embodiments, the composition comprises a targeting moiety, wherein the targeting moiety mediates receptor-mediated endocytosis into selected cells of a selected cell population in the absence of cell isolation or purification.

[0059] In some embodiments, the nanoparticle is a lipid nanoparticle, a core-shell nanoparticle, or a biodegradable nanoparticle. In some embodiments, the nanoparticle comprises one or more cationic lipids, ionizable lipids, or poly n-amino esters. In some embodiments, the nanoparticle comprises one or more non-cationic lipids. In some embodiments, the nanoparticle comprises one or more PEG-modified lipids, polyglutamic acid lipids, structural lipid or hyaluronic acid lipids. In certain embodiments, the nanoparticle comprises cholesterol. In some embodiments, the structural lipid is a beta-sitosterol. In some embodiments, the structural lipid is not a beta sitosterol. In some embodiments, the nanoparticle comprises arachidonic acid or oleic acid. In some embodiments, the nanoparticle comprises more than one circular RNA polynucleotide.

[0060] In some embodiments, the structural lipid binds to C1q and/or promotes the binding of the transfer vehicle comprising said lipid to C1q compared to a control transfer vehicle lacking the structural lipid and/or increases uptake of C1q-bound transfer vehicle into an immune cell compared to a control transfer vehicle lacking the structural lipid.

[0061] In some embodiments, the PEG-modified lipid is DSPE-PEG, DMG-PEG, or PEG-1. In some embodiments, the PEG-modified lipid is DSPE-PEG(2000).

[0062] In some embodiments, the pharmaceutic composition further comprises a helper lipid. In some embodiments, the helper lipid is DSPC or DOPE.

[0063] In some embodiments, the pharmaceutic composition comprises DOPE, cholesterol, and DSPE-PEG.

[0064] In some embodiments, the transfer vehicle comprises about 0.5% to about 4% PEG-modified lipids by molar ratio. In some embodiments, the transfer vehicle comprises about 1% to about 2% PEG-modified lipids by molar ratio.

[0065] In some embodiments, the molar ration of ionizable lipid:DSPC:cholesterol:DSPE-PEG(2000) is 62:4:33:1.

[0066] In some embodiments, the transfer vehicle comprises an ionizable lipid, a DOPE, cholesterol, and a DSPE-PEG(2000).

[0067] In some embodiments, the molar ration of ionizable lipid:DSPC:cholesterol:DSPE-PEG(2000) is 50:10:38.5:1.5.

[0068] In some embodiments, the transfer vehicle has a nitrogen:phosphate (N:P) ratio of about 3 to about 6.

[0069] In some embodiments, the transfer vehicle is formulated for endosomal release of the circular RNA polynucleotide.

[0070] In some embodiments, the transfer vehicle is capable of binding to APOE. In some embodiments, the transfer vehicle interacts with apolipoprotein E (APOE) less than an equivalent transfer vehicle loaded with a reference linear RNA having the same expression sequence as the circular RNA polynucleotide. In some embodiments, the exterior surface of the transfer vehicle is substantially free of APOE binding sites.

[0071] In some embodiments, the transfer vehicle has a diameter of less than about 120 nm. In some embodiments, the transfer vehicle does not form aggregates with a diameter of more than 300 nm.

[0072] In some embodiments, the transfer vehicle has a diameter of less than about 120 nm. In some embodiments, the transfer vehicle does not form aggregates with a diameter of more than 300 nm.

[0073] In some embodiments, the transfer vehicle has an in vivo half-life of less than about 30 hours.

[0074] In some embodiments, the transfer vehicle is capable of low density lipoprotein receptor (LDLR) dependent uptake into a cell. In some embodiments, the transfer vehicle is capable of LDLR independent uptake into a cell.

[0075] In some embodiments, the pharmaceutical composition is substantially free of linear RNA.

[0076] In some embodiments, the pharmaceutical composition further comprises a targeting moiety operably connected to the transfer vehicle. In some embodiments, the targeting moiety specifically binds an immune cell antigen or indirectly. In some embodiments, the immune cell antigen is a T cell antigen. In some embodiments, the T cell antigen is selected from the group consisting of CD2, CD3, CD5, CD7, CD8, CD4, beta7 integrin, beta2 integrin, and C1q.

[0077] In some embodiments, the pharmaceutical composition further comprises an adapter molecule comprising a transfer vehicle binding moiety and a cell binding moiety, wherein the targeting moiety specifically binds the transfer vehicle binding moiety and the cell binding moiety specifically binds a target cell antigen. In some embodiments, the target cell antigen is an immune cell antigen. In some embodiments, the immune cell antigen is a T cell antigen, an NK cell, an NKT cell, a macrophage, or a neutrophil. In some embodiments, the T cell antigen is selected from the group consisting of CD2, CD3, CD5, CD7, CD8, CD4, beta7 integrin, beta2 integrin, CD25, CD39, CD73, A2a Receptor, A2b Receptor, and C1q. In some embodiments, the immune cell antigen is a macrophage antigen. In some embodiments, the macrophage antigen is selected from the group consisting of mannose receptor, CD206, and C1q.

[0078] In some embodiments, the targeting moiety is a small molecule. In some embodiments, the small molecule binds to an ectoenzyme on an immune cell, wherein the ectoenzyme is selected from the group consisting of CD38, CD73, adenosine 2a receptor, and adenosine 2b receptor. In some embodiments, the small molecule is mannose, a lectin, acivicin, biotin, or digoxigenin.

[0079] In some embodiments, the targeting moiety is a single chain Fv (scFv) fragment, nanobody, peptide, peptide-based macrocycle, minibody, small molecule ligand such as folate, arginylglycylaspartic acid (RGD), or phenol-soluble modulin alpha 1 peptide (PSMA1), heavy chain variable region, light chain variable region or fragment thereof.

[0080] In some embodiments, the ionizable lipid has a half-life in a cell membrane less than about 2 weeks. In some embodiments, the ionizable lipid has a half-life in a cell membrane less than about 1 week. In some embodiments, the ionizable lipid has a half-life in a cell membrane less than about 30 hours. In some embodiments, the ionizable lipid has a half-life in a cell membrane less than the functional half-life of the circular RNA polynucleotide.

[0081] In another aspect, the present application provides a method of treating or preventing a disease, disorder, or condition, comprising administering an effective amount of a pharmaceutical composition disclosed herein. In some embodiments, the disease, disorder, or condition is associated with aberrant expression, activity, or localization of a polypeptide selected from Tables 27 or 28. In some embodiments, the circular RNA polynucleotide encodes a therapeutic protein. In some embodiments, therapeutic protein expression in the spleen is higher than therapeutic protein expression in the liver. In some embodiments, therapeutic protein expression in the spleen is at least about 2.9× therapeutic protein expression in the liver. In some embodiments, the therapeutic protein is not expressed at functional levels in the liver. In some embodiments, the therapeutic protein is not expressed at detectable levels in the liver. In some embodiments, therapeutic protein expression in the spleen is at least about 63% of total therapeutic protein expression.

[0082] In some embodiments, the linear RNA polynucleotide comprises a 3′ Anabaena group I intron fragment and a 5′ Anabaena group I intron fragment. In some embodiments, the reference RNA polynucleotide comprises a reference 3′ Anabaena group I intron fragment and a reference 5′ Anabaena group I intron fragment. In some embodiments, the reference 3′ Anabaena group I intron fragment and reference 5′ Anabaena group I intron fragment were generated using the L6-5 permutation site. In some embodiments, the 3′ Anabaena group I intron fragment and 5′ Anabaena group I intron fragment were not generated using the L6-5 permutation site. In some embodiments, the 3′ Anabaena group I intron fragment comprises or consists of a sequence selected from SEQ ID NO: 112-123 and 125-150. In some embodiments, the 5′ Anabaena group I intron fragment comprises a corresponding sequence selected from SEQ ID NO: 73-84 and 86-111. In some embodiments, the 5′ Anabaena group I intron fragment comprises or consists of a sequence selected from SEQ ID NO: 73-84 and 86-111. In some embodiments, the 3′ Anabaena group I intron fragment comprises or consists of a corresponding sequence selected from SEQ ID NO: 112-124 and 125-150.

[0083] In some embodiments, the IRES comprises a nucleotide sequence selected from SEQ ID NOs: 348-351. In some embodiments, the reference IRES is CVB3. In some embodiments, the IRES is not CVB3. In some embodiments, the IRES comprises a sequence selected from SEQ ID NOs: 1-64 and 66-72.

[0084] In another aspect, the present application discloses a circular RNA polynucleotide produced from the linear RNA disclosed herein.

[0085] In another aspect, the present application discloses a circular RNA comprising, from 5′ to 3′, a 3′ group I intron fragment, an IRES, an expression sequence, and a 5′ group I intron fragment, wherein the IRES comprises a nucleotide sequence selected from SEQ ID NOs: 348-351.

[0086] In some embodiments, the circular RNA polynucleotide further comprises a spacer between the 3′ group I intron fragment and the IRES.

[0087] In some embodiments, the circular RNA polynucleotide further comprises a first and a second duplex forming regions capable of forming a duplex. In some embodiments, the first and second duplex forming regions each have a length of about 9 to 19 nucleotides. In some embodiments, the first and second duplex forming regions each have a length of about 30 nucleotides.

[0088] In an aspect, provided herein is a vector for making a circular RNA polynucleotide, comprising, in the following order, an optional 5′ duplex forming region, a 3′ Group I intron fragment, an Internal Ribosome Entry Site (IRES), a first expression sequence, a polynucleotide sequence encoding a cleavage site, a second expression sequence, a 5′ Group I intron fragment, and an optional 3′ duplex forming region. In an aspect, provided herein is a vector for making a circular RNA polynucleotide, comprising, in the following order, an optional 5′ duplex forming region, a 3′ Group I intron fragment, a first Internal Ribosome Entry Site (IRES), a first expression sequence, a second IRES, a second expression sequence, a 5′ Group I intron fragment, and an optional 3′ duplex forming region. In some embodiments, a polynucleotide contains a 3′ duplex forming region and a 5′ duplex forming region. In certain embodiments, vector comprises a first spacer between the 5′ duplex forming region and the 3′ group I intron fragment, and a second spacer between the 5′ group I intron fragment and the 3′ duplex forming region. In certain embodiments, the first and second spacers each have a length of about 5 to about 60 nucleotides. In certain embodiments, the first and second spacers each have a length of about 8 to about 60 nucleotides. In certain embodiments, the first and second spacers each comprise an unstructured region at least 5 nucleotides long. In certain embodiments, the first and second spacers each comprise a structured region at least 7 nucleotides long. In certain embodiments, the first and second duplex forming regions each have a length of about 9 to 50 nucleotides. In certain embodiments, the vector is codon optimized. In certain embodiments, the vector is lacking at least one microRNA binding site present in an equivalent pre-optimization polynucleotide.

[0089] In an aspect, provided herein is a prokaryotic cell comprising a vector for making a circular RNA polynucleotide, comprising, in the following order, an optional 5′ duplex forming region, a 3′ Group I intron fragment, an Internal Ribosome Entry Site (IRES), a first expression sequence, a polynucleotide sequence encoding a cleavage site, a second expression sequence, a 5′ Group I intron fragment, and an optional 3′ duplex forming region. In some embodiments, a polynucleotide contains a 3′ duplex forming region and a 5′ duplex forming region. In an aspect, provided herein is a prokaryotic cell comprising a vector for making a circular RNA polynucleotide, comprising, in the following order, an optional 5′ duplex forming region, a 3′ Group I intron fragment, a first Internal Ribosome Entry Site (IRES), a first expression sequence, a second IRES, a second expression sequence, a 5′ Group I intron fragment, and an optional 3′ duplex forming region. In some embodiments, a polynucleotide contains a 3′ duplex forming region and a 5′ duplex forming region.

[0090] In an aspect, provided herein is a eukaryotic cell comprising a circular RNA polynucleotide of the present disclosure. In some embodiments, the eukaryotic cell is a human cell. In some embodiments, the eukaryotic cell is an immune cell. In some embodiments, the eukaryotic cell is a T cell, NK cell, an NKT cell, a macrophage, or a neutrophil.

### BRIEF DESCRIPTION OF THE DRAWINGS

[0091] FIG. 1 depicts luminescence in supernatants of HEK293 (FIGS. 1A, 1D, and 1E), HepG2 (FIG. 1B), or 1C1C7 (FIG. 1C) cells 24 hours after transfection with circular RNA comprising a Gaussia luciferase expression sequence and various IRES sequences.

[0092] FIG. 2 depicts luminescence in supernatants of HEK293 (FIG. 2A), HepG2 (FIG. 2B), or 1C1C7 (FIG. 2C) cells 24 hours after transfection with circular RNA comprising a Gaussia luciferase expression sequence and various IRES sequences having different lengths.

[0093] FIG. 3 depicts stability of select IRES constructs in HepG2 (FIG. 3A) or 1C1C7 (FIG. 3B) cells over 3 days as measured by luminescence.

[0094] FIG. 4A and FIG. 4B depict protein expression from select IRES constructs in Jurkat cells, as measured by luminescence from secreted Gaussia luciferase in cell supernatants.

[0095] FIG. 5A and FIG. 5B depict stability of select IRES constructs in Jurkat cells over 3 days as measured by luminescence.

[0096] FIG. 6 depicts comparisons of 24 hour luminescence (FIG. 6A) or relative luminescence over 3 days (FIG. 6B) of modified linear, unpurified circular, or purified circular RNA encoding Gaussia luciferase.

[0097] FIG. 7 depicts transcript induction of IFNγ (FIG. 7A), IL-6 (FIG. 7B), IL-2 (FIG. 7C), RIG-I (FIG. 7D), FN-β1 (FIG. 7E), and TNFα (FIG. 7F) after electroporation of Jurkat cells with modified linear, unpurified circular, or purified circular RNA.

[0098] FIG. 8 depicts a comparison of luminescence of circular RNA and modified linear RNA encoding Gaussia luciferase in human primary monocytes (FIG. 8A) and macrophages (FIG. 8B and FIG. 8C).

[0099] FIG. 9 depicts relative luminescence over 3 days (FIG. 9A) in supernatant of primary T cells after transduction with circular RNA comprising a Gaussia luciferase expression sequence and varying IRES sequences or 24 hour luminescence (FIG. 9B).

[0100] FIG. 10 depicts 24 hour luminescence in supernatant of primary T cells (FIG. 10A) after transduction with circular RNA or modified linear RNA comprising a Gaussia luciferase expression sequence, or relative luminescence over 3 days (FIG. 10B), and 24 hour luminescence in PBMCs (FIG. 10C).

[0101] FIG. 11 depicts HPLC chromatograms (FIG. 11A) and circularization efficiencies (FIG. 11B) of RNA constructs having different permutation sites.

[0102] FIG. 12 depicts HPLC chromatograms (FIG. 12A) and circularization efficiencies (FIG. 12B) of RNA constructs having different introns and/or permutation sites.

[0103] FIG. 13 depicts HPLC chromatograms (FIG. 13A) and circularization efficiencies (FIG. 13B) of 3 RNA constructs with or without homology arms.

[0104] FIG. 14 depicts circularization efficiencies of 3 RNA constructs without homology arms or with homology arms having various lengths and GC content.

[0105] FIGS. 15A and 15B depict HPLC chromatograms showing the contribution of strong homology arms to improved splicing efficiency, the relationship between circularization efficiency and nicking in select constructs, and combinations of permutations sites and homology arms hypothesized to demonstrate improved circularization efficiency.

[0106] FIG. 16 shows fluorescent images of T cells mock electroporated (left) or electroporated with circular RNA encoding a CAR (right) and co-cultured with Raji cells expressing GFP and firefly luciferase.

[0107] FIG. 17 shows bright field (left), fluorescent (center), and overlay (right) images of T cells mock electroporated (top) or electroporated with circular RNA encoding a CAR (bottom) and co-cultured with Raji cells expressing GFP and firefly luciferase.

[0108] FIG. 18 depicts specific lysis of Raji target cells by T cells mock electroporated or electroporated with circular RNA encoding different CAR sequences.

[0109] FIG. 19 depicts luminescence in supernatants of Jurkat cells (left) or resting primary human CD3+ T cells (right) 24 hours after transduction with linear or circular RNA comprising a Gaussia luciferase expression sequence and varying IRES sequences (FIG. 19A), and relative luminescence over 3 days (FIG. 19B).

[0110] FIG. 20 depicts transcript induction of IFN-β1 (FIG. 20A), RIG-I (FIG. 20B), IL-2 (FIG. 20C), IL-6 (FIG. 20D), IFNγ (FIG. 20E), and TNFα (FIG. 20F) after electroporation of human CD3+ T cells with modified linear, unpurified circular, or purified circular RNA.

[0111] FIG. 21 depicts specific lysis of Raji target cells by human primary CD3+ T cells electroporated with circRNA encoding a CAR as determined by detection of firefly luminescence (FIG. 21A), and IFNγ transcript induction 24 hours after electroporation with different quantities of circular or linear RNA encoding a CAR sequence (FIG. 21B).

[0112] FIG. 22 depicts specific lysis of target or non-target cells by human primary CD3+ T cells electroporated with circular or linear RNA encoding a CAR at different E:T ratios (FIG. 22A and FIG. 22B) as determined by detection of firefly luminescence.

[0113] FIG. 23 depicts specific lysis of target cells by human CD3+ T cells electroporated with RNA encoding a CAR at 1, 3, 5, and 7 days post electroporation.

[0114] FIG. 24 depicts specific lysis of target cells by human CD3+ T cells electroporated with circular RNA encoding a CD19 or BCMA targeted CAR.

[0115] FIG. 25 depicts total Flux of organs harvested from CD-1 mice dosed with circular RNA encoding FLuc and formulated with 50% Lipid 15 (Table 10b), 10% DSPC, 1.5% PEG-DMG, and 38.5% cholesterol.

[0116] FIG. 26 shows images highlighting the luminescence of organs harvested from CD-1 mice dosed with circular RNA encoding FLuc and formulated with 50% Lipid 15 (Table 10b), 10% DSPC, 1.5% PEG-DMG, and 38.5% cholesterol.

[0117] FIG. 27 depicts molecular characterization of Lipids 26 and 27 from Table 10a. FIG. 27A shows the proton nuclear magnetic resonance (NMR) spectrum of Lipid 26. FIG. 27B shows the retention time of Lipid 26 measured by liquid chromatography-mass spectrometry (LC-MS). FIG. 27C shows the mass spectrum of Lipid 26. FIG. 27D shows the proton NMR spectrum of Lipid 27. FIG. 27E shows the retention time of Lipid 27 measured by LC-MS. FIG. 27F shows the mass spectrum of Lipid 27.

[0118] FIG. 28 depicts molecular characterization of Lipid 22-S14 and its synthetic intermediates. FIG. 28A depicts the NMR spectrum of 2-(tetradecylthio)ethan-1-ol. FIG. 28B depicts the NMR spectrum of 2-(tetradecylthio)ethyl acrylate. FIG. 28C depicts the NMR spectrum of bis(2-(tetradecylthio)ethyl) 3,3′-((3-(2-methyl-1H-imidazol-1-yl)propyl)azanediyl)dipropionate (Lipid 22-S14).

[0119] FIG. 29 depicts the NMR spectrum of bis(2-(tetradecylthio)ethyl) 3,3′-((3-(1H-imidazol-1-yl)propyl)azanediyl)dipropionate (Lipid 93-S14).

[0120] FIG. 30 depicts molecular characterization of heptadecan-9-yl 8-((3-(2-methyl-1H-imidazol-1-yl)propyl)(8-(nonyloxy)-8-oxooctyl)amino)octanoate (Lipid 54 from Table 10a). FIG. 30A shows the proton NMR spectrum of Lipid 54. FIG. 30B shows the retention time of Lipid 54 measured by LC-MS. FIG. 30C shows the mass spectrum of Lipid 54.

[0121] FIG. 31 depicts molecular characterization of heptadecan-9-yl 8-((3-(1H-imidazol-1-yl)propyl)(8-(nonyloxy)-8-oxooctyl)amino)octanoate (Lipid 53 from Table 10a).

[0122] FIG. 31A shows the proton NMR spectrum of Lipid 53. FIG. 31B shows the retention time of Lipid 53 measured by LC-MS. FIG. 31C shows the mass spectrum of Lipid 53.

[0123] FIG. 32A depicts total flux of spleen and liver harvested from CD-1 mice dosed with circular RNA encoding firefly luciferase (FLuc) and formulated with ionizable lipid of interest, DSPC, cholesterol, and DSPE-PEG 2000 (Avanti Polar Lipids Inc.) at a weight ratio of 16:1:4:1 or 62:4:33:1 molar ratio. FIG. 32B depicts average radiance for biodistribution of protein expression.

[0124] FIG. 33A depicts images highlighting the luminescence of organs harvested from CD-1 mice dosed with circular RNA encoding FLuc and formulated with ionizable Lipid 22-S14, DSPC, cholesterol, and DSPE-PEG 2000 (Avanti Polar Lipids Inc.) at a weight ratio of 16:1:4:1 or 62:4:33:1 molar ratio. FIG. 33B depicts whole body IVIS images of CD-1 mice dosed with circular RNA encoding FLuc and formulated with ionizable Lipid 22-S14, DSPC, cholesterol, and DSPE-PEG 2000 (Avanti Polar Lipids Inc.) at a weight ratio of 16:1:4:1 or 62:4:33:1 molar ratio.

[0125] FIG. 34A depicts images highlighting the luminescence of organs harvested from CD-1 mice dosed with circular RNA encoding FLuc and formulated with ionizable Lipid 93-S14, DSPC, cholesterol, and DSPE-PEG 2000 (Avanti Polar Lipids Inc.) at a weight ratio of 16:1:4:1 or 62:4:33:1 molar ratio. FIG. 34B depicts whole body IVIS images of CD-1 mice dosed with circular RNA encoding FLuc and formulated with ionizable Lipid 93-S14, DSPC, cholesterol, and DSPE-PEG 2000 (Avanti Polar Lipids Inc.) at a weight ratio of 16:1:4:1 or 62:4:33:1 molar ratio.

[0126] FIG. 35A depicts images highlighting the luminescence of organs harvested from CD-1 mice dosed with circular RNA encoding FLuc and formulated with ionizable Lipid 26 from Table 10a, DSPC, cholesterol, and DSPE-PEG 2000 (Avanti Polar Lipids Inc.) at a weight ratio of 16:1:4:1 or 62:4:33:1 molar ratio. FIG. 35B depicts whole body IVIS images of CD-1 mice dosed with circular RNA encoding FLuc and formulated with ionizable Lipid 26, DSPC, cholesterol, and DSPE-PEG 2000 (Avanti Polar Lipids Inc.) at a weight ratio of 16:1:4:1 or 62:4:33:1 molar ratio.

[0127] FIG. 36 depicts images highlighting the luminescence of organs harvested from c57BL/6J mice dosed with circular RNA encoding FLuc and encapsulated in lipid nanoparticles formed with Lipid 15 from Table 10b (FIG. 36A), Lipid 53 from Table 10a (FIG. 36B), or Lipid 54 from Table 10a (FIG. 36C). PBS was used as control (FIG. 36D).

[0128] FIG. 37A and FIG. 37B depict relative luminescence in the lysates of human PBMCs after 24-hour incubation with testing lipid nanoparticles containing circular RNA encoding firefly luciferase.

[0129] FIG. 38 shows the expression of GFP (FIG. 38A) and CD19 CAR (FIG. 38B) in human PBMCs after incubating with testing lipid nanoparticle containing circular RNA encoding either GFP or CD19 CAR.

[0130] FIG. 39 depicts the expression of an anti-murine CD19 CAR in 1C1C7 cells lipotransfected with circular RNA comprising an anti-murine CD19 CAR expression sequence and varying IRES sequences.

[0131] FIG. 40 shows the cytotoxicity of an anti-murine CD19 CAR to murine T cells. The CD19 CAR is encoded by and expressed from a circular RNA, which is electroporated into the murine T cells.

[0132] FIG. 41 depicts the B cell counts in peripheral blood (FIG. 40A and FIG. 40B) or spleen (FIG. 40C) in C57BL/6J mice injected every other day with testing lipid nanoparticles encapsulating a circular RNA encoding an anti-murine CD19 CAR.

[0133] FIGS. 42A and 42B compares the expression level of an anti-human CD19 CAR expressed from a circular RNA with that expressed from a linear mRNA.

[0134] FIGS. 43A and 43B compares the cytotoxic effect of an anti-human CD19 CAR expressed from a circular RNA with that expressed from a linear mRNA

[0135] FIG. 44 depicts the cytotoxicity of two CARs (anti-human CD19 CAR and anti-human BCMA CAR) expressed from a single circular RNA in T cells.

[0136] FIG. 45A shows representative FACS plots with frequencies of tdTomato expression in various spleen immune cell subsets following treatment with LNPs formed with Lipid 27 or 26 from Table 10a or Lipid 15 from Table 10b. FIG. 45B shows the quantification of the proportion of myeloid cells, B cells, and T cells expressing tdTomato (mean+std. dev., n=3), equivalent to the proportion of each cell population successfully transfected with Cre circular RNA. FIG. 45C illustrates the proportion of additional splenic immune cell populations, including NK cells, classical monocytes, nonclassical monocytes, neutrophils, and dendritic cells, expressing tdTomato after treatment with Lipids 27 and 26 (mean+std. dev., n=3).

[0137] FIG. 46A depicts an exemplary RNA construct design with built-in polyA sequences in the introns. FIG. 46B shows the chromatography trace of unpurified circular RNA. FIG. 46C shows the chromatography trace of affinity-purified circular RNA. FIG. 46D shows the immunogenicity of the circular RNAs prepared with varying IVT conditions and purification methods. (Commercial=commercial IVT mix; Custom=customized IVT mix; Aff=affinity purification; Enz=enzyme purification; GMP:GTP ratio=8, 12.5, or 13.75).

[0138] FIG. 47A depicts an exemplary RNA construct design with a dedicated binding sequence as an alternative to polyA for hybridization purification. FIG. 47B shows the chromatography trace of unpurified circular RNA. FIG. 46C shows the chromatography trace of affinity-purified circular RNA.

[0139] FIG. 48A shows the chromatography trace of unpurified circular RNA encoding dystrophin. FIG. 48B shows the chromatography trace of enzyme-purified circular RNA encoding dystrophin.

[0140] FIG. 49 compares the expression (FIG. 49A) and stability (FIG. 49B) of purified circRNAs with different 5′ spacers between the 3′ intron fragment/5′ internal duplex region and the IRES in Jurkat cells. (AC=only A and C were used in the spacer sequence; UC=only U and C were used in the spacer sequence.)

[0141] FIG. 50 shows luminescence expression levels and stability of expression in primary T cells from circular RNAs containing the original or modified IRES elements indicated.

[0142] FIG. 51 shows luminescence expression levels and stability of expression in HepG2 cells from circular RNAs containing the original or modified IRES elements indicated.

[0143] FIG. 52 shows luminescence expression levels and stability of expression in 1C1C7 cells from circular RNAs containing the original or modified IRES elements indicated.

[0144] FIG. 53 shows luminescence expression levels and stability of expression in HepG2 cells from circular RNAs containing IRES elements with untranslated regions (UTRs) inserted or hybrid IRES elements. “Scr” means Scrambled, which was used as a control.

[0145] FIG. 54 shows luminescence expression levels and stability of expression in 1C1C7 cells from circular RNAs containing an IRES and variable stop codon cassettes operably linked to a Gaussia luciferase coding sequence.

[0146] FIG. 55 shows luminescence expression levels and stability of expression in 1C1C7 cells from circular RNAs containing an IRES and variable untranslated regions (UTRs) inserted before the start codon of a gaussian luciferase coding sequence.

[0147] FIG. 56 shows expression levels of human erythropoietin (hEPO) in Huh7 cells from circular RNAs containing two miR-122 target sites downstream from the hEPO coding sequence.

[0148] FIG. 57 shows CAR expression levels in the peripheral blood (FIG. 57A) and spleen (FIG. 57B) when treated with LNP encapsulating circular RNA that expresses anti-CD19 CAR. Anti-CD20 (aCD20) and circular RNA encoding luciferase (oLuc) were used for comparison.

[0149] FIG. 58 shows the overall frequency of anti-CD19 CAR expression, the frequency of anti-CD19 CAR expression on the surface of cells and effect on anti-tumor response of IRES specific circular RNA encoding anti-CD19 CARs on T-cells. FIG. 58A shows anti-CD19 CAR geometric mean florescence intensity, FIG. 58B shows percentage of anti-CD19 CAR expression, and FIG. 58C shows the percentage target cell lysis performed by the anti-CD19 CAR. (CK=Caprine Kobuvirus; AP=Apodemus Picornavirus; CK*=Caprine Kobuvirus with codon optimization; PV=Parabovirus; SV=Salivirus.)

[0150] FIG. 59 shows CAR expression levels of A20 FLuc target cells when treated with IRES specific circular RNA constructs.

[0151] FIG. 60 shows luminescence expression levels for cytosolic (FIG. 60A) and surface (FIG. 60B) proteins from circular RNA in primary human T-cells.

[0152] FIG. 61 shows luminescence expression in human T-cells when treated with IRES specific circular constructs. Expression in circular RNA constructs were compared to linear mRNA. FIG. 61A, FIG. 61B, and FIG. 61G provide Gaussia luciferase expression in multiple donor cells. FIG. 61C, FIG. 61D, FIG. 61E, and FIG. 61F provides firefly luciferase expression in multiple donor cells.

[0153] FIG. 62 shows anti-CD19 CAR (FIG. 62A and FIG. 62B) and anti-BCMA CAR (FIG. 62B) expression in human T-cells following treatment of a lipid nanoparticle encompassing a circular RNA that encodes either an anti-CD19 or anti-BCMA CAR to a firefly luciferase expressing K562 cell.

[0154] FIG. 63 shows anti-CD19 CAR expression levels resulting from delivery via electroporation in vitro of a circular RNA encoding an anti-CD19 CAR in a specific antigen-dependent manner. FIG. 63A shows Nalm6 cell lysing with an anti-CD19 CAR. FIG. 63B shows K562 cell lysing with an anti-CD19 CAR.

[0155] FIG. 64 shows transfection of LNP mediated by use of ApoE3 in solutions containing LNP and circular RNA expressing green fluorescence protein (GFP). FIG. 64A showed the live-dead results. FIG. 64B, FIG. 61C, FIG. 61D, and FIG. 64E provide the frequency of expression for multiple donors.

### DETAILED DESCRIPTION

[0156] The present invention provides, among other things, methods and compositions for treating an autoimmune disorder or cancer based on circular RNA therapy. In particular, the present invention provides methods for treating an autoimmune disorder or cancer by administering to a subject in need of treatment a composition comprising an RNA encoding 2 therapeutic proteins at an effective dose and an administration interval such that at least one symptom or feature of an autoimmune disorder or cancer is reduced in intensity, severity, or frequency or is delayed in onset.

[0157] In certain embodiments, provided herein is a vector for making circular RNA, the vector comprising an optional 5′ duplex forming region, a 3′ group I intron fragment, optionally a first spacer, an Internal Ribosome Entry Site (IRES), a first expression sequence, a polynucleotide sequence encoding a cleavage site, a second expression sequence, optionally a second spacer, a 5′ group I intron fragment, and an optional 3′ duplex forming region. In certain embodiments, provided herein is a vector for making circular RNA, the vector comprising an optional 5′ duplex forming region, a 3′ group I intron fragment, optionally a first spacer, a first Internal Ribosome Entry Site (IRES), a first expression sequence, a second IRES, a second expression sequence, optionally a second spacer, a 5′ group I intron fragment, and an optional 3′ duplex forming region. In some embodiments, these elements are positioned in the vector in the above order. In some embodiments, a polynucleotide contains a 3′ duplex forming region and a 5′ duplex forming region. In some embodiments, the vector further comprises an internal 5′ duplex forming region between the 3′ group I intron fragment and the IRES and an internal 3′ duplex forming region between the expression sequences and the 5′ group I intron fragment. In some embodiments, the internal duplex forming regions are capable of forming a duplex between each other but not with the external duplex forming regions. In some embodiments, the internal duplex forming regions are part of the first and second spacers. Additional embodiments include circular RNA polynucleotides, including circular RNA polynucleotides made using the vectors provided herein, compositions comprising such circular RNA, cells comprising such circular RNA, methods of using and making such vectors, circular RNA, compositions and cells.

[0158] In some embodiments, provided herein are methods comprising administration of circular RNA polynucleotides provided herein into cells for therapy or production of useful proteins. In some embodiments, the method is advantageous in providing the production of a desired polypeptide inside eukaryotic cells with a longer half-life than linear RNA, due to the resistance of the circular RNA to ribonucleases.

[0159] Circular RNA polynucleotides lack the free ends necessary for exonuclease-mediated degradation, causing them to be resistant to several mechanisms of RNA degradation and granting extended half-lives when compared to an equivalent linear RNA. Circularization may allow for the stabilization of RNA polynucleotides that generally suffer from short half-lives and may improve the overall efficacy of exogenous mRNA in a variety of applications. In an embodiment, the functional half-life of the circular RNA polynucleotides provided herein in eukaryotic cells (e.g., mammalian cells, such as human cells) as assessed by protein synthesis is at least 20 hours (e.g., at least 80 hours).

### 1. Definitions

[0160] As used herein, the terms “circRNA” or “circular polyribonucleotide” or “circular RNA” are used interchangeably and refers to a polyribonucleotide that forms a circular structure through covalent bonds.

[0161] As used herein, the term “3′ group I intron fragment” refers to a sequence with 75% or higher similarity to the 3′-proximal end of a natural group I intron including the splice site dinucleotide and optionally a stretch of natural exon sequence.

[0162] As used herein, the term “5′ group I intron fragment” refers to a sequence with 75% or higher similarity to the 5′-proximal end of a natural group I intron including the splice site dinucleotide and optionally a stretch of natural exon sequence.

[0163] As used herein, the term “permutation site” refers to the site in a group I intron where a cut is made prior to permutation of the intron. This cut generates 3′ and 5′ group I intron fragments that are permuted to be on either side of a stretch of precursor RNA to be circularized.

[0164] As used herein, the term “splice site” refers to a dinucleotide that is partially or fully included in a group I intron and between which a phosphodiester bond is cleaved during RNA circularization.

[0165] The expression sequences in the polynucleotide construct may be separated by a “cleavage site” sequence which enables polypeptides encoded by the expression sequences, once translated, to be expressed separately by the cell.

[0166] A “self-cleaving peptide” refers to a peptide which is translated without a peptide bond between two adjacent amino acids, or functions such that when the polypeptide comprising the proteins and the self-cleaving peptide is produced, it is immediately cleaved or separated into distinct and discrete first and second polypeptides without the need for any external cleavage activity.

[0167] As used herein, the term “therapeutic protein” refers to any protein that, when administered to a subject directly or indirectly in the form of a translated nucleic acid, has a therapeutic, diagnostic, and/or prophylactic effect and/or elicits a desired biological and/or pharmacological effect.

[0168] The α and β chains of αβ TCR's are generally regarded as each having two domains or regions, namely variable and constant domains/regions. The variable domain consists of a concatenation of variable regions and joining regions. In the present specification and claims, the term “TCR alpha variable domain” therefore refers to the concatenation of TRAV and TRAJ regions, and the term TCR alpha constant domain refers to the extracellular TRAC region, or to a C-terminal truncated TRAC sequence. Likewise the term “TCR beta variable domain” refers to the concatenation of TRBV and TRBD/TRBJ regions, and the term TCR beta constant domain refers to the extracellular TRBC region, or to a C-terminal truncated TRBC sequence.

[0169] As used herein, the term “immunogenic” refers to a potential to induce an immune response to a substance. An immune response may be induced when an immune system of an organism or a certain type of immune cell is exposed to an immunogenic substance. The term “non-immunogenic” refers to a lack of or absence of an immune response above a detectable threshold to a substance. No immune response is detected when an immune system of an organism or a certain type of immune cell is exposed to a non-immunogenic substance. In some embodiments, a non-immunogenic circular polyribonucleotide as provided herein, does not induce an immune response above a pre-determined threshold when measured by an immunogenicity assay. In some embodiments, no innate immune response is detected when an immune system of an organism or a certain type of immune cell is exposed to a non-immunogenic circular polyribonucleotide as provided herein. In some embodiments, no adaptive immune response is detected when an immune system of an organism or a certain type of immune cell is exposed to a non-immunogenic circular polyribonucleotide as provided herein.

[0170] As used herein, the term “circularization efficiency” refers to a measurement of resultant circular polyribonucleotide as compared to its linear starting material.

[0171] As used herein, the term “translation efficiency” refers to a rate or amount of protein or peptide production from a ribonucleotide transcript. In some embodiments, translation efficiency can be expressed as amount of protein or peptide produced per given amount of transcript that codes for the protein or peptide.

[0172] The term “nucleotide” refers to a ribonucleotide, a deoxyribonucleotide, a modified form thereof, or an analog thereof. Nucleotides include species that comprise purines, e.g., adenine, hypoxanthine, guanine, and their derivatives and analogs, as well as pyrimidines, e.g., cytosine, uracil, thymine, and their derivatives and analogs. Nucleotide analogs include nucleotides having modifications in the chemical structure of the base, sugar and/or phosphate, including, but not limited to, 5′-position pyrimidine modifications, 8′-position purine modifications, modifications at cytosine exocyclic amines, and substitution of 5-bromo-uracil; and 2′-position sugar modifications, including but not limited to, sugar-modified ribonucleotides in which the 2′-OH is replaced by a group such as an H, OR, R, halo, SH, SR, NH₂, NHR, NR₂, or CN, wherein R is an alkyl moiety as defined herein. Nucleotide analogs are also meant to include nucleotides with bases such as inosine, queuosine, xanthine; sugars such as 2′-methyl ribose; non-natural phosphodiester linkages such as methylphosphonate, phosphorothioate and peptide linkages. Nucleotide analogs include 5-methoxyuridine, 1-methylpseudouridine, and 6-methyladenosine.

[0173] The term “nucleic acid” and “polynucleotide” are used interchangeably herein to describe a polymer of any length, e.g., greater than about 2 bases, greater than about 10 bases, greater than about 100 bases, greater than about 500 bases, greater than 1000 bases, or up to about 10,000 or more bases, composed of nucleotides, e.g., deoxyribonucleotides or ribonucleotides, and may be produced enzymatically or synthetically (e.g., as described in U.S. Pat. No. 5,948,902 and the references cited therein), which can hybridize with naturally occurring nucleic acids in a sequence specific manner analogous to that of two naturally occurring nucleic acids, e.g., can participate in Watson-Crick base pairing interactions. Naturally occurring nucleic acids are comprised of nucleotides including guanine, cytosine, adenine, thymine, and uracil (G, C, A, T, and U respectively).

[0174] The terms “ribonucleic acid” and “RNA” as used herein mean a polymer composed of ribonucleotides.

[0175] The terms “deoxyribonucleic acid” and “DNA” as used herein mean a polymer composed of deoxyribonucleotides.

[0176] “Isolated” or “purified” generally refers to isolation of a substance (for example, in some embodiments, a compound, a polynucleotide, a protein, a polypeptide, a polynucleotide composition, or a polypeptide composition) such that the substance comprises a significant percent (e.g., greater than 1%, greater than 2%, greater than 5%, greater than 10%, greater than 20%, greater than 50%, or more, usually up to about 90%-100%) of the sample in which it resides. In certain embodiments, a substantially purified component comprises at least 50%, 80%-85%, or 90%-95% of the sample. Techniques for purifying polynucleotides and polypeptides of interest are well-known in the art and include, for example, ion-exchange chromatography, affinity chromatography and sedimentation according to density. Generally, a substance is purified when it exists in a sample in an amount, relative to other components of the sample, that is more than as it is found naturally.

[0177] The terms “duplexed,” “double-stranded,” or “hybridized” as used herein refer to nucleic acids formed by hybridization of two single strands of nucleic acids containing complementary sequences. In most cases, genomic DNA is double-stranded. Sequences can be fully complementary or partially complementary.

[0178] As used herein, “unstructured” with regard to RNA refers to an RNA sequence that is not predicted by the RNAFold software or similar predictive tools to form a structure (e.g., a hairpin loop) with itself or other sequences in the same RNA molecule. In some embodiments, unstructured RNA can be functionally characterized using nuclease protection assays.

[0179] As used herein, “structured” with regard to RNA refers to an RNA sequence that is predicted by the RNAFold software or similar predictive tools to form a structure (e.g., a hairpin loop) with itself or other sequences in the same RNA molecule.

[0180] As used herein, two “duplex forming regions,” “homology arms,” or “homology regions,” complement, or are complementary, to one another when the two regions share a sufficient level of sequence identity to one another's reverse complement to act as substrates for a hybridization reaction. As used herein, polynucleotide sequences have “homology” when they are either identical or share sequence identity to a reverse complement or “complementary” sequence. The percent sequence identity between a duplex forming region and a counterpart duplex forming region's reverse complement can be any percent of sequence identity that allows for hybridization to occur. In some embodiments, an internal duplex forming region of an inventive polynucleotide is capable of forming a duplex with another internal duplex forming region and does not form a duplex with an external duplex forming region.

[0181] Linear nucleic acid molecules are said to have a “5′-terminus” (5′ end) and a “3′-terminus” (3′ end) because nucleic acid phosphodiester linkages occur at the 5′ carbon and 3′ carbon of the sugar moieties of the substituent mononucleotides. The end nucleotide of a polynucleotide at which a new linkage would be to a 5′ carbon is its 5′ terminal nucleotide. The end nucleotide of a polynucleotide at which a new linkage would be to a 3′ carbon is its 3′ terminal nucleotide. A terminal nucleotide, as used herein, is the nucleotide at the end position of the 3′- or 5′-terminus.

[0182] “Transcription” means the formation or synthesis of an RNA molecule by an RNA polymerase using a DNA molecule as a template. The invention is not limited with respect to the RNA polymerase that is used for transcription. For example, in some embodiments, a T7-type RNA polymerase can be used.

[0183] “Translation” means the formation of a polypeptide molecule by a ribosome based upon an RNA template.

[0184] It is to be understood that the terminology used herein is for the purpose of describing particular embodiments only, and is not intended to be limiting. As used in this specification and the appended claims, the singular forms “a,” “an,” and “the” include plural referents unless the content clearly dictates otherwise. Thus, for example, reference to “a cell” includes combinations of two or more cells, or entire cultures of cells; reference to “a polynucleotide” includes, as a practical matter, many copies of that polynucleotide. Unless specifically stated or obvious from context, as used herein, the term “or” is understood to be inclusive. Unless defined herein and below in the reminder of the specification, all technical and scientific terms used herein have the same meaning as commonly understood by one of ordinary skill in the art to which the invention pertains.

[0185] Unless specifically stated or obvious from context, as used herein, the term “about,” is understood as within a range of normal tolerance in the art, for example within 2 standard deviations of the mean. “About” can be understood as within 10%, 9%, 8%, 7%, 6%, 5%, 4% 3%, 2%, 1%, 0.9%, 0.8%, 0.7%, 0.6%, 0.5%, 0.4%0, 0.3%, 0.2%, 0.1%, 0.09%, 0.08%, 0.07%, 0.06%, 0.05%, 0.04%, 0.03%, 0.02%, or 0.01% of the stated value. Unless otherwise clear from the context, all numerical values provided herein are modified by the term “about.”

[0186] As used herein, the term “encode” refers broadly to any process whereby the information in a polymeric macromolecule is used to direct the production of a second molecule that is different from the first. The second molecule may have a chemical structure that is different from the chemical nature of the first molecule.

[0187] By “co-administering” is meant administering a therapeutic agent provided herein in conjunction with one or more additional therapeutic agents sufficiently close in time such that the therapeutic agent provided herein can enhance the effect of the one or more additional therapeutic agents, or vice versa.

[0188] The terms “treat,” and “prevent” as well as words stemming therefrom, as used herein, do not necessarily imply 100% or complete treatment or prevention. Rather, there are varying degrees of treatment or prevention of which one of ordinary skill in the art recognizes as having a potential benefit or therapeutic effect. The treatment or prevention provided by the method disclosed herein can include treatment or prevention of one or more conditions or symptoms of the disease. Also, for purposes herein, “prevention” can encompass delaying the onset of the disease, or a symptom or condition thereof.

[0189] As used herein, “autoimmunity” is defined as persistent and progressive immune reactions to non-infectious self-antigens, as distinct from infectious non self-antigens from bacterial, viral, fungal, or parasitic organisms which invade and persist within mammals and humans. Autoimmune conditions include scleroderma, Grave's disease, Crohn's disease, Sjorgen's disease, multiple sclerosis, Hashimoto's disease, psoriasis, myasthenia gravis, autoimmune polyendocrinopathy syndromes, Type I diabetes mellitus (TIDM), autoimmune gastritis, autoimmune uveoretinitis, polymyositis, colitis, and thyroiditis, as well as in the generalized autoimmune diseases typified by human Lupus. “Autoantigen” or “self-antigen” as used herein refers to an antigen or epitope which is native to the mammal and which is immunogenic in said mammal.

[0190] As used herein, the term “expression sequence” can refer to a nucleic acid sequence that encodes a product, e.g., a peptide or polypeptide, regulatory nucleic acid, or non-coding nucleic acid. An exemplary expression sequence that codes for a peptide or polypeptide can comprise a plurality of nucleotide triads, each of which can code for an amino acid and is termed as a “codon”.

[0191] As used herein, a “spacer” refers to a region of a polynucleotide sequence ranging from 1 nucleotide to hundreds or thousands of nucleotides separating two other elements along a polynucleotide sequence. The sequences can be defined or can be random. A spacer is typically non-coding. In some embodiments, spacers include duplex forming regions.

[0192] As used herein, an “internal ribosome entry site” or “IRES” refers to an RNA sequence or structural element ranging in size from 10 nt to 1000 nt or more, capable of initiating translation of a polypeptide in the absence of a typical RNA cap structure. An IRES is typically about 500 nt to about 700 nt in length.

[0193] As used herein, an “miRNA site” refers to a stretch of nucleotides within a polynucleotide that is capable of forming a duplex with at least 8 nucleotides of a natural miRNA sequence.

[0194] As used herein, an “endonuclease site” refers to a stretch of nucleotides within a polynucleotide that is capable of being recognized and cleaved by an endonuclease protein.

[0195] As used herein, “bicistronic RNA” refers to a polynucleotide that includes two expression sequences coding for two distinct proteins. These expression sequences are often separated by a cleavable peptide such as a 2A site or an IRES sequence. They can also be separated by a ribosomal skipping element or a protease cleavage.

[0196] As used herein, the term “ribosomal skipping element” refers to a nucleotide sequence encoding a short peptide sequence capable of causing generation of two peptide chains from translation of one RNA molecule. While wishing not to be bound by theory, it is hypothesized that the ribosomal skipping elements function by: (1) terminating translation of the first peptide chain and re-initiating translation of the second peptide chain; or (2) cleavage of a peptide bond in the peptide sequence encoded by the ribosomal skipping element by an intrinsic protease activity of the encoded peptide, or by another protease in the environment (e.g., cytosol).

[0197] As used herein, the term “co-formulate” refers to a nanoparticle formulation comprising two or more nucleic acids or a nucleic acid and other active drug substance. Typically, the ratios are equimolar or defined in the ratiometric amount of the two or more nucleic acids or the nucleic acid and other active drug substance.

[0198] As used herein, “transfer vehicle” includes any of the standard pharmaceutical carriers, diluents, excipients, and the like, which are generally intended for use in connection with the administration of biologically active agents, including nucleic acids.

[0199] As used herein, the phrase “lipid nanoparticle” refers to a transfer vehicle comprising one or more lipids (e.g., in some embodiments, cationic lipids, non-cationic lipids, and PEG-modified lipids).

[0200] As used herein, the phrase “cationic lipid” refers to any of a number of lipid species that carry a net positive charge at a selected pH, such as physiological pH.

[0201] As used herein, the phrase “non-cationic lipid” refers to any neutral, zwitterionic or anionic lipid.

[0202] As used herein, the phrase “anionic lipid” refers to any of a number of lipid species that carry a net negative charge at a selected pH, such as physiological pH.

[0203] As used herein, the phrase “ionizable lipid” refers to any of a number of lipid species that carry a net positive charge at a selected pH, such as physiological pH 4 and a neutral charge at other pHs such as physiological pH 7.

[0204] In some embodiments, a lipid, e.g., an ionizable lipid, disclosed herein comprises one or more cleavable groups. The terms “cleave” and “cleavable” are used herein to mean that one or more chemical bonds (e.g., one or more of covalent bonds, hydrogen-bonds, van der Waals' forces and/or ionic interactions) between atoms in or adjacent to the subject functional group are broken (e.g., hydrolyzed) or are capable of being broken upon exposure to selected conditions (e.g., upon exposure to enzymatic conditions). In certain embodiments, the cleavable group is a disulfide functional group, and in particular embodiments is a disulfide group that is capable of being cleaved upon exposure to selected biological conditions (e.g., intracellular conditions). In certain embodiments, the cleavable group is an ester functional group that is capable of being cleaved upon exposure to selected biological conditions. For example, the disulfide groups may be cleaved enzymatically or by a hydrolysis, oxidation or reduction reaction. Upon cleavage of such disulfide functional group, the one or more functional moieties or groups (e.g., one or more of a head-group and/or a tail-group) that are bound thereto may be liberated. Exemplary cleavable groups may include, but are not limited to, disulfide groups, ester groups, ether groups, and any derivatives thereof (e.g., alkyl and aryl esters). In certain embodiments, the cleavable group is not an ester group or an ether group. In some embodiments, a cleavable group is bound (e.g., bound by one or more of hydrogen-bonds, van der Waals' forces, ionic interactions and covalent bonds) to one or more functional moieties or groups (e.g., at least one head-group and at least one tail-group). In certain embodiments, at least one of the functional moieties or groups is hydrophilic (e.g., a hydrophilic head-group comprising one or more of imidazole, guanidinium, amino, imine, enamine, optionally-substituted alkyl amino and pyridyl).

[0205] As used herein, the term “hydrophilic” is used to indicate in qualitative terms that a functional group is water-preferring, and typically such groups are water-soluble. For example, disclosed herein are compounds that comprise a cleavable disulfide (S—S) functional group bound to one or more hydrophilic groups (e.g., a hydrophilic head-group), wherein such hydrophilic groups comprise or are selected from the group consisting of imidazole, guanidinium, amino, imine, enamine, an optionally-substituted alkyl amino (e.g., an alkyl amino such as dimethylamino) and pyridyl.

[0206] In certain embodiments, at least one of the functional groups of moieties that comprise the compounds disclosed herein is hydrophobic in nature (e.g., a hydrophobic tail-group comprising a naturally occurring lipid such as cholesterol). As used herein, the term “hydrophobic” is used to indicate in qualitative terms that a functional group is water-avoiding, and typically such groups are not water soluble. For example, disclosed herein are compounds that comprise a cleavable functional group (e.g., a disulfide (S—S) group) bound to one or more hydrophobic groups, wherein such hydrophobic groups comprise one or more naturally occurring lipids such as cholesterol, and/or an optionally substituted, variably saturated or unsaturated C₆-C₂₀ alkyl and/or an optionally substituted, variably saturated or unsaturated C₆-C₂₀ acyl.

[0207] Compound described herein may also comprise one or more isotopic substitutions. For example, H may be in any isotopic form, including ¹H, ²H (D or deuterium), and ³H (T or tritium); C may be in any isotopic form, including ¹²C, ¹³C, and ¹⁴C; O may be in any isotopic form, including ¹⁶O and ¹⁸O; F may be in any isotopic form, including ¹⁸F and ¹⁹F; and the like.

[0208] When describing the invention, which may include compounds and pharmaceutically acceptable salts thereof, pharmaceutical compositions containing such compounds and methods of using such compounds and compositions, the following terms, if present, have the following meanings unless otherwise indicated. It should also be understood that when described herein any of the moieties defined forth below may be substituted with a variety of substituents, and that the respective definitions are intended to include such substituted moieties within their scope as set out below. Unless otherwise stated, the term “substituted” is to be defined as set out below. It should be further understood that the terms “groups” and “radicals” can be considered interchangeable when used herein.

[0209] When a range of values is listed, it is intended to encompass each value and sub-range within the range. For example, “C₁₋₆ alkyl” is intended to encompass, C₁, C₂, C₃, C₄, C₅, C₆, C₁₋₆, C₁₋₅, C₁₋₄, C₁₋₃, C₁₋₂, C₂₋₆, C₂₋₅, C₂₋₄, C₂₋₃, C₃₋₆, C₃₋₅, C₃₋₄, C₄₋₆, C₄₋₅, and C₅₋₆ alkyl.

[0210] In certain embodiments, the compounds disclosed herein comprise, for example, at least one hydrophilic head-group and at least one hydrophobic tail-group, each bound to at least one cleavable group, thereby rendering such compounds amphiphilic. As used herein to describe a compound or composition, the term “amphiphilic” means the ability to dissolve in both polar (e.g., water) and non-polar (e.g., lipid) environments. For example, in certain embodiments, the compounds disclosed herein comprise at least one lipophilic tail-group (e.g., cholesterol or a C₆-C₂₀ alkyl) and at least one hydrophilic head-group (e.g., imidazole), each bound to a cleavable group (e.g., disulfide).

[0211] It should be noted that the terms “head-group” and “tail-group” as used describe the compounds of the present invention, and in particular functional groups that comprise such compounds, are used for ease of reference to describe the orientation of one or more functional groups relative to other functional groups. For example, in certain embodiments a hydrophilic head-group (e.g., guanidinium) is bound (e.g., by one or more of hydrogen-bonds, van der Waals' forces, ionic interactions and covalent bonds) to a cleavable functional group (e.g., a disulfide group), which in turn is bound to a hydrophobic tail-group (e.g., cholesterol).

[0212] As used herein, the term “alkyl” refers to both straight and branched chain C₁-C₄₀ hydrocarbons (e.g., C₆-C₂₀ hydrocarbons), and include both saturated and unsaturated hydrocarbons. In certain embodiments, the alkyl may comprise one or more cyclic alkyls and/or one or more heteroatoms such as oxygen, nitrogen, or sulfur and may optionally be substituted with substituents (e.g., one or more of alkyl, halo, alkoxyl, hydroxy, amino, aryl, ether, ester or amide). In certain embodiments, a contemplated alkyl includes (9Z,12Z)-octadeca-9,12-dien. The use of designations such as, for example, “C₆-C₂₀” is intended to refer to an alkyl (e.g., straight or branched chain and inclusive of alkenes and alkyls) having the recited range carbon atoms. In some embodiments, an alkyl group has 1 to 10 carbon atoms (“C₁₋₁₀ alkyl”). In some embodiments, an alkyl group has 1 to 9 carbon atoms (“C₁₋₉ alkyl”). In some embodiments, an alkyl group has 1 to 8 carbon atoms (“C₁₋₈ alkyl”). In some embodiments, an alkyl group has 1 to 7 carbon atoms (“C₁₋₇ alkyl”). In some embodiments, an alkyl group has 1 to 6 carbon atoms (“C₁₋₆ alkyl”). In some embodiments, an alkyl group has 1 to 5 carbon atoms (“C₁₋₅ alkyl”). In some embodiments, an alkyl group has 1 to 4 carbon atoms (“C₁₋₄ alkyl”). In some embodiments, an alkyl group has 1 to 3 carbon atoms (“C₁₋₃ alkyl”). In some embodiments, an alkyl group has 1 to 2 carbon atoms (“C₁₋₂ alkyl”). In some embodiments, an alkyl group has 1 carbon atom (“C₁ alkyl”). Examples of C₁₋₆ alkyl groups include methyl, ethyl, propyl, isopropyl, butyl, isobutyl, pentyl, hexyl, and the like.

[0213] As used herein, “alkenyl” refers to a radical of a straight-chain or branched hydrocarbon group having from 2 to 20 carbon atoms, one or more carbon-carbon double bonds (e.g., 1, 2, 3, or 4 carbon-carbon double bonds), and optionally one or more carbon-carbon triple bonds (e.g., 1, 2, 3, or 4 carbon-carbon triple bonds) (“C₂₋₂₀ alkenyl”). In certain embodiments, alkenyl does not contain any triple bonds. In some embodiments, an alkenyl group has 2 to 10 carbon atoms (“C₂₋₁₀ alkenyl”). In some embodiments, an alkenyl group has 2 to 9 carbon atoms (“C₂₋₉ alkenyl”). In some embodiments, an alkenyl group has 2 to 8 carbon atoms (“C₂₋₈ alkenyl”). In some embodiments, an alkenyl group has 2 to 7 carbon atoms (“C₂₋₇ alkenyl”). In some embodiments, an alkenyl group has 2 to 6 carbon atoms (“C₂₋₆ alkenyl”). In some embodiments, an alkenyl group has 2 to 5 carbon atoms (“C₂₋₅ alkenyl”). In some embodiments, an alkenyl group has 2 to 4 carbon atoms (“C₂₋₄ alkenyl”). In some embodiments, an alkenyl group has 2 to 3 carbon atoms (“C₂₋₃ alkenyl”). In some embodiments, an alkenyl group has 2 carbon atoms (“C₂ alkenyl”). The one or more carbon-carbon double bonds can be internal (such as in 2-butenyl) or terminal (such as in 1-butenyl). Examples of C₂₋₄ alkenyl groups include ethenyl (C₂), 1-propenyl (C₃), 2-propenyl (C₃), 1-butenyl (C₄), 2-butenyl (C₄), butadienyl (C₄), and the like. Examples of C₂₋₆ alkenyl groups include the aforementioned C₂₋₄ alkenyl groups as well as pentenyl (C₅), pentadienyl (C₅), hexenyl (C₆), and the like. Additional examples of alkenyl include heptenyl (C₇), octenyl (C₈), octatrienyl (C₈), and the like.

[0214] As used herein, “alkynyl” refers to a radical of a straight-chain or branched hydrocarbon group having from 2 to 20 carbon atoms, one or more carbon-carbon triple bonds (e.g., 1, 2, 3, or 4 carbon-carbon triple bonds), and optionally one or more carbon-carbon double bonds (e.g., 1, 2, 3, or 4 carbon-carbon double bonds) (“C₂₋₂₀ alkynyl”). In certain embodiments, alkynyl does not contain any double bonds. In some embodiments, an alkynyl group has 2 to 10 carbon atoms (“C₂₋₁₀ alkynyl”). In some embodiments, an alkynyl group has 2 to 9 carbon atoms (“C₂₋₉ alkynyl”). In some embodiments, an alkynyl group has 2 to 8 carbon atoms (“C₂₋₈ alkynyl”). In some embodiments, an alkynyl group has 2 to 7 carbon atoms (“C₂₋₇ alkynyl”). In some embodiments, an alkynyl group has 2 to 6 carbon atoms (“C₂₋₆ alkynyl”). In some embodiments, an alkynyl group has 2 to 5 carbon atoms (“C₂₋₅ alkynyl”). In some embodiments, an alkynyl group has 2 to 4 carbon atoms (“C₂₋₄ alkynyl”). In some embodiments, an alkynyl group has 2 to 3 carbon atoms (“C₂₋₃ alkynyl”). In some embodiments, an alkynyl group has 2 carbon atoms (“C₂ alkynyl”). The one or more carbon-carbon triple bonds can be internal (such as in 2-butynyl) or terminal (such as in 1-butynyl). Examples of C₂₋₄ alkynyl groups include, without limitation, ethynyl (C₂), 1-propynyl (C₃), 2-propynyl (C₃), 1-butynyl (C₄), 2-butynyl (C₄), and the like. Examples of C₂₋₆ alkenyl groups include the aforementioned C₂₋₄ alkynyl groups as well as pentynyl (C₅), hexynyl (C₆), and the like. Additional examples of alkynyl include heptynyl (C₇), octynyl (C₈), and the like.

[0215] As used herein, “alkylene,” “alkenylene,” and “alkynylene,” refer to a divalent radical of an alkyl, alkenyl, and alkynyl group respectively. When a range or number of carbons is provided for a particular “alkylene,” “alkenylene,” or “alkynylene,” group, it is understood that the range or number refers to the range or number of carbons in the linear carbon divalent chain. “Alkylene,” “alkenylene,” and “alkynylene,” groups may be substituted or unsubstituted with one or more substituents as described herein.

[0216] As used herein, the term “aryl” refers to aromatic groups (e.g., monocyclic, bicyclic and tricyclic structures) containing six to ten carbons in the ring portion. The aryl groups may be optionally substituted through available carbon atoms and in certain embodiments may include one or more heteroatoms such as oxygen, nitrogen or sulfur. In some embodiments, an aryl group has six ring carbon atoms (“C₆ aryl”; e.g., phenyl). In some embodiments, an aryl group has ten ring carbon atoms (“C₁₀ aryl”; e.g., naphthyl such as 1-naphthyl and 2-naphthyl).

[0217] As used herein, “heteroaryl” refers to a radical of a 5-10 membered monocyclic or bicyclic 4n+2 aromatic ring system (e.g., having 6 or 10 electrons shared in a cyclic array) having ring carbon atoms and 1-4 ring heteroatoms provided in the aromatic ring system, wherein each heteroatom is independently selected from nitrogen, oxygen and sulfur (“5-10 membered heteroaryl”). In heteroaryl groups that contain one or more nitrogen atoms, the point of attachment can be a carbon or nitrogen atom, as valency permits. Heteroaryl bicyclic ring systems can include one or more heteroatoms in one or both rings. “Heteroaryl” includes ring systems wherein the heteroaryl ring, as defined above, is fused with one or more carbocyclyl or heterocyclyl groups wherein the point of attachment is on the heteroaryl ring, and in such instances, the number of ring members continue to designate the number of ring members in the heteroaryl ring system. “Heteroaryl” also includes ring systems wherein the heteroaryl ring, as defined above, is fused with one or more aryl groups wherein the point of attachment is either on the aryl or heteroaryl ring, and in such instances, the number of ring members designates the number of ring members in the fused (aryl/heteroaryl) ring system. Bicyclic heteroaryl groups wherein one ring does not contain a heteroatom (e.g., indolyl, quinolinyl, carbazolyl, and the like) the point of attachment can be on either ring, i.e., either the ring bearing a heteroatom (e.g., 2-indolyl) or the ring that does not contain a heteroatom (e.g., 5-indolyl).

[0218] The term “cycloalkyl” refers to a monovalent saturated cyclic, bicyclic, or bridged cyclic (e.g., adamantyl) hydrocarbon group of 3-12, 3-8, 4-8, or 4-6 carbons, referred to herein, e.g., as “C₄₋₈cycloalkyl,” derived from a cycloalkane. Exemplary cycloalkyl groups include, but are not limited to, cyclohexanes, cyclopentanes, cyclobutanes and cyclopropanes.

[0219] As used herein, “heterocyclyl” or “heterocyclic” refers to a radical of a 3- to 10-membered non-aromatic ring system having ring carbon atoms and 1 to 4 ring heteroatoms, wherein each heteroatom is independently selected from nitrogen, oxygen, sulfur, boron, phosphorus, and silicon (“3-10 membered heterocyclyl”). In heterocyclyl groups that contain one or more nitrogen atoms, the point of attachment can be a carbon or nitrogen atom, as valency permits. A heterocyclyl group can either be monocyclic (“monocyclic heterocyclyl”) or a fused, bridged or spiro ring system such as a bicyclic system (“bicyclic heterocyclyl”), and can be saturated or can be partially unsaturated. Heterocyclyl bicyclic ring systems can include one or more heteroatoms in one or both rings. “Heterocyclyl” also includes ring systems wherein the heterocyclyl ring, as defined above, is fused with one or more carbocyclyl groups wherein the point of attachment is either on the carbocyclyl or heterocyclyl ring, or ring systems wherein the heterocyclyl ring, as defined above, is fused with one or more aryl or heteroaryl groups, wherein the point of attachment is on the heterocyclyl ring, and in such instances, the number of ring members continue to designate the number of ring members in the heterocyclyl ring system. The terms “heterocycle,” “heterocyclyl,” “heterocyclyl ring,” “heterocyclic group,” “heterocyclic moiety,” and “heterocyclic radical,” may be used interchangeably.

[0220] As used herein, “cyano” refers to —CN.

[0221] The terms “halo” and “halogen” as used herein refer to an atom selected from fluorine (fluoro, F), chlorine (chloro, Cl), bromine (bromo, Br), and iodine (iodo, I). In certain embodiments, the halo group is either fluoro or chloro.

[0222] The term “alkoxy,” as used herein, refers to an alkyl group which is attached to another moiety via an oxygen atom (—O(alkyl)). Non-limiting examples include e.g., methoxy, ethoxy, propoxy, and butoxy.

[0223] As used herein, “oxo” refers to —C═O.

[0224] In general, the term “substituted”, whether preceded by the term “optionally” or not, means that at least one hydrogen present on a group (e.g., a carbon or nitrogen atom) is replaced with a permissible substituent, e.g., a substituent which upon substitution results in a stable compound, e.g., a compound which does not spontaneously undergo transformation such as by rearrangement, cyclization, elimination, or other reaction. Unless otherwise indicated, a “substituted” group has a substituent at one or more substitutable positions of the group, and when more than one position in any given structure is substituted, the substituent is either the same or different at each position.

[0225] As used herein, “pharmaceutically acceptable salt” refers to those salts which are, within the scope of sound medical judgment, suitable for use in contact with the tissues of humans and lower animals without undue toxicity, irritation, allergic response and the like, and are commensurate with a reasonable benefit/risk ratio. Pharmaceutically acceptable salts are well known in the art. For example, Berge et al., describes pharmaceutically acceptable salts in detail in J. Pharmaceutical Sciences (1977) 66:1-19. Pharmaceutically acceptable salts of the compounds of this invention include those derived from suitable inorganic and organic acids and bases. Examples of pharmaceutically acceptable, nontoxic acid addition salts are salts of an amino group formed with inorganic acids such as hydrochloric acid, hydrobromic acid, phosphoric acid, sulfuric acid and perchloric acid or with organic acids such as acetic acid, oxalic acid, maleic acid, tartaric acid, citric acid, succinic acid or malonic acid or by using other methods used in the art such as ion exchange. Other pharmaceutically acceptable salts include adipate, alginate, ascorbate, aspartate, benzenesulfonate, benzoate, bisulfate, borate, butyrate, camphorate, camphorsulfonate, citrate, cyclopentanepropionate, digluconate, dodecylsulfate, ethanesulfonate, formate, fumarate, glucoheptonate, glycerophosphate, gluconate, hemisulfate, heptanoate, hexanoate, hydroiodide, 2-hydroxy-ethanesulfonate, lactobionate, lactate, laurate, lauryl sulfate, malate, maleate, malonate, methanesulfonate, 2-naphthalenesulfonate, nicotinate, nitrate, oleate, oxalate, palmitate, pamoate, pectinate, persulfate, 3-phenylpropionate, phosphate, picrate, pivalate, propionate, stearate, succinate, sulfate, tartrate, thiocyanate, p-toluenesulfonate, undecanoate, valerate salts, and the like. Pharmaceutically acceptable salts derived from appropriate bases include alkali metal, alkaline earth metal, ammonium and N⁺(C₁₋₄alkyl)₄ salts. Representative alkali or alkaline earth metal salts include sodium, lithium, potassium, calcium, magnesium, and the like. Further pharmaceutically acceptable salts include, when appropriate, nontoxic ammonium, quaternary ammonium, and amine cations formed using counterions such as halide, hydroxide, carboxylate, sulfate, phosphate, nitrate, lower alkyl sulfonate, and aryl sulfonate.

[0226] In typical embodiments, the present invention is intended to encompass the compounds disclosed herein, and the pharmaceutically acceptable salts, pharmaceutically acceptable esters, tautomeric forms, polymorphs, and prodrugs of such compounds. In some embodiments, the present invention includes a pharmaceutically acceptable addition salt, a pharmaceutically acceptable ester, a solvate (e.g., hydrate) of an addition salt, a tautomeric form, a polymorph, an enantiomer, a mixture of enantiomers, a stereoisomer or mixture of stereoisomers (pure or as a racemic or non-racemic mixture) of a compound described herein.

[0227] Compounds described herein can comprise one or more asymmetric centers, and thus can exist in various isomeric forms, e.g., enantiomers and/or diastereomers. For example, the compounds described herein can be in the form of an individual enantiomer, diastereomer or geometric isomer, or can be in the form of a mixture of stereoisomers, including racemic mixtures and mixtures enriched in one or more stereoisomer. Isomers can be isolated from mixtures by methods known to those skilled in the art, including chiral high pressure liquid chromatography (HPLC) and the formation and crystallization of chiral salts; or preferred isomers can be prepared by asymmetric syntheses. See, for example, Jacques et al., Enantiomers, Racemates and Resolutions (Wiley Interscience, New York, 1981); Wilen et al., Tetrahedron 33:2725 (1977); Eliel, Stereochemistry of Carbon Compounds (McGraw-Hill, NY, 1962); and Wilen, Tables of Resolving Agents and Optical Resolutions p. 268 (E. L. Eliel, Ed., Univ. of Notre Dame Press, Notre Dame, IN 1972). The invention additionally encompasses compounds described herein as individual isomers substantially free of other isomers, and alternatively, as mixtures of various isomers.

[0228] In certain embodiments the compounds and the transfer vehicles of which such compounds are a component (e.g., lipid nanoparticles) exhibit an enhanced (e.g., increased) ability to transfect one or more target cells. Accordingly, also provided herein are methods of transfecting one or more target cells. Such methods generally comprise the step of contacting the one or more target cells with the compounds and/or pharmaceutical compositions disclosed herein such that the one or more target cells are transfected with the circular RNA encapsulated therein. As used herein, the terms “transfect” or “transfection” refer to the intracellular introduction of one or more encapsulated materials (e.g., nucleic acids and/or polynucleotides) into a cell, or preferably into a target cell. The term “transfection efficiency” refers to the relative amount of such encapsulated material (e.g., polynucleotides) up-taken by, introduced into and/or expressed by the target cell which is subject to transfection. In some embodiments, transfection efficiency may be estimated by the amount of a reporter polynucleotide product produced by the target cells following transfection. In some embodiments, a transfer vehicle has high transfection efficiency. In some embodiments, a transfer vehicle has at least about 10%, 20%, 30%, 40%, 50%, 60%, 70%, 80%, or 90% transfection efficiency.

[0229] As used herein, the term “liposome” generally refers to a vesicle composed of lipids (e.g., amphiphilic lipids) arranged in one or more spherical bilayer or bilayers. In certain embodiments, the liposome is a lipid nanoparticle (e.g., a lipid nanoparticle comprising one or more of the ionizable lipid compounds disclosed herein). Such liposomes may be unilamellar or multilamellar vesicles which have a membrane formed from a lipophilic material and an aqueous interior that contains the encapsulated circRNA to be delivered to one or more target cells, tissues and organs. In certain embodiments, the compositions described herein comprise one or more lipid nanoparticles. Examples of suitable lipids (e.g., ionizable lipids) that may be used to form the liposomes and lipid nanoparticles contemplated include one or more of the compounds disclosed herein (e.g., HGT4001, HGT4002, HGT4003, HGT4004 and/or HGT4005). Such liposomes and lipid nanoparticles may also comprise additional ionizable lipids such as C12-200, DLin-KC2-DMA, and/or HGT5001, helper lipids, structural lipids, PEG-modified lipids, MC3, DLinDMA, DLinkC2DMA, cKK-E12, ICE, HGT5000, DODAC, DDAB, DMRIE, DOSPA, DOGS, DODAP, DODMA, DMDMA, DODAC, DLenDMA, DMRIE, CLinDMA, CpLinDMA, DMOBA, DOcarbDAP, DLinDAP, DLincarbDAP, DLinCDAP, KLin-K-DMA, DLin-K-XTC2-DMA, HGT4003, and combinations thereof.

[0230] As used herein, the phrases “non-cationic lipid”, “non-cationic helper lipid”, and “helper lipid” are used interchangeably and refer to any neutral, zwitterionic or anionic lipid.

[0231] As used herein, the phrase “anionic lipid” refers to any of a number of lipid species that carry a net negative charge at a selected pH, such as physiological pH.

[0232] As used herein, the phrase “biodegradable lipid” or “degradable lipid” refers to any of a number of lipid species that are broken down in a host environment on the order of minutes, hours, or days ideally making them less toxic and unlikely to accumulate in a host over time. Common modifications to lipids include ester bonds, and disulfide bonds among others to increase the biodegradability of a lipid.

[0233] As used herein, the phrase “biodegradable PEG lipid” or “degradable PEG lipid” refers to any of a number of lipid species where the PEG molecules are cleaved from the lipid in a host environment on the order of minutes, hours, or days ideally making them less immunogenic. Common modifications to PEG lipids include ester bonds, and disulfide bonds among others to increase the biodegradability of a lipid.

[0234] In certain embodiments of the present invention, the transfer vehicles (e.g., lipid nanoparticles) are prepared to encapsulate one or more materials or therapeutic agents (e.g., circRNA). The process of incorporating a desired therapeutic agent (e.g., circRNA) into a transfer vehicle is referred to herein as or “loading” or “encapsulating” (Lasic, et al., FEBS Lett., 312: 255-258, 1992). The transfer vehicle-loaded or -encapsulated materials (e.g., circRNA) may be completely or partially located in the interior space of the transfer vehicle, within a bilayer membrane of the transfer vehicle, or associated with the exterior surface of the transfer vehicle.

[0235] As used herein, the term “structural lipid” refers to sterols and also to lipids containing sterol moieties.

[0236] As defined herein, “sterols” are a subgroup of steroids consisting of steroid alcohols.

[0237] As used herein, the term “structural lipid” refers to sterols and also to lipids containing sterol moieties.

[0238] As used herein, the term “PEG” means any polyethylene glycol or other polyalkylene ether polymer.

[0239] As generally defined herein, a “PEG-OH lipid” (also referred to herein as “hydroxy-PEGylated lipid”) is a PEGylated lipid having one or more hydroxyl (—OH) groups on the lipid.

[0240] As used herein, a “phospholipid” is a lipid that includes a phosphate moiety and one or more carbon chains, such as unsaturated fatty acid chains.

[0241] All nucleotide sequences disclosed herein can represent an RNA sequence or a corresponding DNA sequence. It is understood that deoxythymidine (dT or T) in a DNA is transcribed into a uridine (U) in an RNA. As such, “T” and “U” are used interchangeably herein in nucleotide sequences.

[0242] The recitations “sequence identity” or, for example, comprising a “sequence 50% identical to,” as used herein, refer to the extent that sequences are identical on a nucleotide-by-nucleotide basis or an amino acid-by-amino acid basis over a window of comparison. Thus, a “percentage of sequence identity” may be calculated by comparing two optimally aligned sequences over the window of comparison, determining the number of positions at which the identical nucleic acid base (e.g., A, T, C, G, I) or the identical amino acid residue (e.g., Ala, Pro, Ser, Thr, Gly, Val, Leu, Ile, Phe, Tyr, Trp, Lys, Arg, His, Asp, Glu, Asn, Gln, Cys and Met) occurs in both sequences to yield the number of matched positions, dividing the number of matched positions by the total number of positions in the window of comparison (i.e., the window size), and multiplying the result by 100 to yield the percentage of sequence identity. Included are nucleotides and polypeptides having at least about 50%, 55%, 60%, 65%, 70%, 75%, 80%, 85%, 90%, 95%, 96%, 97%, 98%, 99% or 100% sequence identity to any of the reference sequences described herein, typically where the polypeptide variant maintains at least one biological activity of the reference polypeptide.

[0243] The term “antibody” (Ab) includes, without limitation, a glycoprotein immunoglobulin which binds specifically to an antigen. In general, an antibody may comprise at least two heavy (H) chains and two light (L) chains interconnected by disulfide bonds, or an antigen-binding molecule thereof. Each H chain may comprise a heavy chain variable region (abbreviated herein as VH) and a heavy chain constant region. The heavy chain constant region can comprise three constant domains, CH1, CH2 and CH3. Each light chain can comprise a light chain variable region (abbreviated herein as VL) and a light chain constant region. The light chain constant region can comprise one constant domain, CL. The VH and VL regions may be further subdivided into regions of hypervariability, termed complementarity determining regions (CDRs), interspersed with regions that are more conserved, termed framework regions (FR). Each VH and VL may comprise three CDRs and four FRs, arranged from amino-terminus to carboxy-terminus in the following order: FR1, CDR1, FR2, CDR2, FR3, CDR3, and FR4. The variable regions of the heavy and light chains contain a binding domain that interacts with an antigen. The constant regions of the Abs may mediate the binding of the immunoglobulin to host tissues or factors, including various cells of the immune system (e.g., effector cells) and the first component of the classical complement system. Antibodies may include, for example, monoclonal antibodies, recombinantly produced antibodies, monospecific antibodies, multispecific antibodies (including bispecific antibodies), human antibodies, engineered antibodies, humanized antibodies, chimeric antibodies, immunoglobulins, synthetic antibodies, tetrameric antibodies comprising two heavy chain and two light chain molecules, an antibody light chain monomer, an antibody heavy chain monomer, an antibody light chain dimer, an antibody heavy chain dimer, an antibody light chain-antibody heavy chain pair, intrabodies, antibody fusions (sometimes referred to herein as “antibody conjugates”), heteroconjugate antibodies, single domain antibodies, monovalent antibodies, single chain antibodies or single-chain variable fragments (scFv), camelized antibodies, affybodies, Fab fragments, F(ab′)₂ fragments, disulfide-linked variable fragments (sdFv), anti-idiotypic (anti-id) antibodies (including, e.g., anti-anti-Id antibodies), minibodies, domain antibodies, synthetic antibodies (sometimes referred to herein as “antibody mimetics”), and antigen-binding fragments of any of the above. In some embodiments, antibodies described herein refer to polyclonal antibody populations.

[0244] An immunoglobulin may derive from any of the commonly known isotypes, including but not limited to IgA, secretory IgA, IgG and IgM. IgG subclasses are also well known to those in the art and include but are not limited to human IgG1, IgG2, IgG3 and IgG4. “Isotype” refers to the Ab class or subclass (e.g., IgM or IgG1) that is encoded by the heavy chain constant region genes. The term “antibody” includes, by way of example, both naturally occurring and non-naturally occurring Abs; monoclonal and polyclonal Abs; chimeric and humanized Abs; human or nonhuman Abs; wholly synthetic Abs; and single chain Abs. A nonhuman Ab may be humanized by recombinant methods to reduce its immunogenicity in humans. Where not expressly stated, and unless the context indicates otherwise, the term “antibody” also includes an antigen-binding fragment or an antigen-binding portion of any of the aforementioned immunoglobulins, and includes a monovalent and a divalent fragment or portion, and a single chain Ab.

[0245] An “antigen binding molecule,” “antigen binding portion,” or “antibody fragment” refers to any molecule that comprises the antigen binding parts (e.g., CDRs) of the antibody from which the molecule is derived. An antigen binding molecule may include the antigenic complementarity determining regions (CDRs). Examples of antibody fragments include, but are not limited to, Fab, Fab′, F(ab′)₂, Fv fragments, dAb, linear antibodies, scFv antibodies, and multispecific antibodies formed from antigen binding molecules. Peptibodies (i.e. Fc fusion molecules comprising peptide binding domains) are another example of suitable antigen binding molecules. In some embodiments, the antigen binding molecule binds to an antigen on a tumor cell. In some embodiments, the antigen binding molecule binds to an antigen on a cell involved in a hyperproliferative disease or to a viral or bacterial antigen. In some embodiments, the antigen binding molecule binds to BCMA. In further embodiments, the antigen binding molecule is an antibody fragment, including one or more of the complementarity determining regions (CDRs) thereof, that specifically binds to the antigen. In further embodiments, the antigen binding molecule is a single chain variable fragment (scFv). In some embodiments, the antigen binding molecule comprises or consists of avimers.

[0246] As used herein, the term “variable region” or “variable domain” is used interchangeably and are common in the art. The variable region typically refers to a portion of an antibody, generally, a portion of a light or heavy chain, typically about the amino-terminal 110 to 120 amino acids in the mature heavy chain and about 90 to 115 amino acids in the mature light chain, which differ extensively in sequence among antibodies and are used in the binding and specificity of a particular antibody for its particular antigen. The variability in sequence is concentrated in those regions called complementarity determining regions (CDRs) while the more highly conserved regions in the variable domain are called framework regions (FR). Without wishing to be bound by any particular mechanism or theory, it is believed that the CDRs of the light and heavy chains are primarily responsible for the interaction and specificity of the antibody with antigen. In some embodiments, the variable region is a human variable region. In some embodiments, the variable region comprises rodent or murine CDRs and human framework regions (FRs). In particular embodiments, the variable region is a primate (e.g., non-human primate) variable region. In some embodiments, the variable region comprises rodent or murine CDRs and primate (e.g., non-human primate) framework regions (FRs).

[0247] The terms “VL” and “VL domain” are used interchangeably to refer to the light chain variable region of an antibody or an antigen-binding molecule thereof.

[0248] The terms “VH” and “VH domain” are used interchangeably to refer to the heavy chain variable region of an antibody or an antigen-binding molecule thereof.

[0249] A number of definitions of the CDRs are commonly in use: Kabat numbering, Chothia numbering, AbM numbering, or contact numbering. The AbM definition is a compromise between the two used by Oxford Molecular's AbM antibody modelling software. The contact definition is based on an analysis of the available complex crystal structures. The term “Kabat numbering” and like terms are recognized in the art and refer to a system of numbering amino acid residues in the heavy and light chain variable regions of an antibody, or an antigen-binding molecule thereof. In certain aspects, the CDRs of an antibody may be determined according to the Kabat numbering system (see, e.g., Kabat E A & Wu T T (1971) Ann NY Acad Sci 190: 382-391 and Kabat E A et al., (1991) Sequences of Proteins of Immunological Interest, Fifth Edition, U.S. Department of Health and Human Services, NIH Publication No. 91-3242). Using the Kabat numbering system, CDRs within an antibody heavy chain molecule are typically present at amino acid positions 31 to 35, which optionally may include one or two additional amino acids, following 35 (referred to in the Kabat numbering scheme as 35A and 35B) (CDR1), amino acid positions 50 to 65 (CDR2), and amino acid positions 95 to 102 (CDR3). Using the Kabat numbering system, CDRs within an antibody light chain molecule are typically present at amino acid positions 24 to 34 (CDR1), amino acid positions 50 to 56 (CDR2), and amino acid positions 89 to 97 (CDR3). In a specific embodiment, the CDRs of the antibodies described herein have been determined according to the Kabat numbering scheme. In certain aspects, the CDRs of an antibody may be determined according to the Chothia numbering scheme, which refers to the location of immunoglobulin structural loops (see, e.g., Chothia C & Lesk A M, (1987), J Mol Biol 196: 901-917; Al-Lazikani B et al, (1997) J Mol Biol 273: 927-948; Chothia C et al., (1992) J Mol Biol 227: 799-817; Tramontano A et al, (1990) J Mol Biol 215(1): 175-82; and U.S. Pat. No. 7,709,226). Typically, when using the Kabat numbering convention, the Chothia CDR-H1 loop is present at heavy chain amino acids 26 to 32, 33, or 34, the Chothia CDR-H2 loop is present at heavy chain amino acids 52 to 56, and the Chothia CDR-H3 loop is present at heavy chain amino acids 95 to 102, while the Chothia CDR-L1 loop is present at light chain amino acids 24 to 34, the Chothia CDR-L2 loop is present at light chain amino acids 50 to 56, and the Chothia CDR-L3 loop is present at light chain amino acids 89 to 97. The end of the Chothia CDR-HI loop when numbered using the Kabat numbering convention varies between H32 and H34 depending on the length of the loop (this is because the Kabat numbering scheme places the insertions at H35A and H35B; if neither 35A nor 35B is present, the loop ends at 32; if only 35A is present, the loop ends at 33; if both 35A and 35B are present, the loop ends at 34). In a specific embodiment, the CDRs of the antibodies described herein have been determined according to the Chothia numbering scheme.

[0250] As used herein, the terms “constant region” and “constant domain” are interchangeable and have a meaning common in the art. The constant region is an antibody portion, e.g., a carboxyl terminal portion of a light and/or heavy chain which is not directly involved in binding of an antibody to antigen but which may exhibit various effector functions, such as interaction with the Fc receptor. The constant region of an immunoglobulin molecule generally has a more conserved amino acid sequence relative to an immunoglobulin variable domain.

[0251] “Binding affinity” generally refers to the strength of the sum total of non-covalent interactions between a single binding site of a molecule (e.g., an antibody) and its binding partner (e.g., an antigen). Unless indicated otherwise, as used herein, “binding affinity” refers to intrinsic binding affinity which reflects a 1:1 interaction between members of a binding pair (e.g., antibody and antigen). The affinity of a molecule X for its partner Y may generally be represented by the dissociation constant (KD or Kd). Affinity may be measured and/or expressed in a number of ways known in the art, including, but not limited to, equilibrium dissociation constant (KD), and equilibrium association constant (KA or Ka). The KD is calculated from the quotient of koff/kon, whereas KA is calculated from the quotient of kon/koff. kon refers to the association rate constant of, e.g., an antibody to an antigen, and koff refers to the dissociation of, e.g., an antibody to an antigen. The kon and koff may be determined by techniques known to one of ordinary skill in the art, such as BIACORE® or KinExA.

[0252] As used herein, a “conservative amino acid substitution” is one in which the amino acid residue is replaced with an amino acid residue having a similar side chain. Families of amino acid residues having similar side chains have been defined in the art. These families include amino acids with basic side chains (e.g., lysine, arginine, histidine), acidic side chains (e.g., aspartic acid, glutamic acid), uncharged polar side chains (e.g., glycine, asparagine, glutamine, serine, threonine, tyrosine, cysteine, tryptophan), nonpolar side chains (e.g., alanine, valine, leucine, isoleucine, proline, phenylalanine, methionine), beta-branched side chains (e.g., threonine, valine, isoleucine) and aromatic side chains (e.g., tyrosine, phenylalanine, tryptophan, histidine). In some embodiments, one or more amino acid residues within a CDR(s) or within a framework region(s) of an antibody or antigen-binding molecule thereof may be replaced with an amino acid residue with a similar side chain.

[0253] As, used herein, the term “heterologous” means from any source other than naturally occurring sequences.

[0254] As used herein, an “epitope” is a term in the art and refers to a localized region of an antigen to which an antibody may specifically bind. An epitope may be, for example, contiguous amino acids of a polypeptide (linear or contiguous epitope) or an epitope can, for example, come together from two or more non-contiguous regions of a polypeptide or polypeptides (conformational, non-linear, discontinuous, or non-contiguous epitope). In some embodiments, the epitope to which an antibody binds may be determined by, e.g., NMR spectroscopy, X-ray diffraction crystallography studies, ELISA assays, hydrogen/deuterium exchange coupled with mass spectrometry (e.g., liquid chromatography electrospray mass spectrometry), array-based oligo-peptide scanning assays, and/or mutagenesis mapping (e.g., site-directed mutagenesis mapping). For X-ray crystallography, crystallization may be accomplished using any of the known methods in the art (e.g., Giege R et al., (1994) Acta Crystallogr D Biol Crystallogr 50(Pt 4): 339-350; McPherson A (1990) Eur J Biochem 189: 1-23; Chayen N E (1997) Structure 5: 1269-1274; McPherson A (1976) J Biol Chem 251: 6300-6303). Antibody: antigen crystals may be studied using well known X-ray diffraction techniques and may be refined using computer software such as X-PLOR (Yale University, 1992, distributed by Molecular Simulations, Inc.; see e.g. Meth Enzymol (1985) volumes 114 & 115, eds Wyckoff H W et al.; U.S. Patent Publication No. 2004/0014194), and BUSTER (Bricogne G (1993) Acta Crystallogr D Biol Crystallogr 49(Pt 1): 37-60; Bricogne G (1997) Meth Enzymol 276A: 361-423, ed Carter C W; Roversi P et al., (2000) Acta Crystallogr D Biol Crystallogr 56(Pt 10): 1316-1323).

[0255] As used herein, an antigen binding molecule, an antibody, or an antigen binding molecule thereof “cross-competes” with a reference antibody or an antigen binding molecule thereof if the interaction between an antigen and the first binding molecule, an antibody, or an antigen binding molecule thereof blocks, limits, inhibits, or otherwise reduces the ability of the reference binding molecule, reference antibody, or an antigen binding molecule thereof to interact with the antigen. Cross competition may be complete, e.g., binding of the binding molecule to the antigen completely blocks the ability of the reference binding molecule to bind the antigen, or it may be partial, e.g., binding of the binding molecule to the antigen reduces the ability of the reference binding molecule to bind the antigen. In some embodiments, an antigen binding molecule that cross-competes with a reference antigen binding molecule binds the same or an overlapping epitope as the reference antigen binding molecule. In other embodiments, the antigen binding molecule that cross-competes with a reference antigen binding molecule binds a different epitope as the reference antigen binding molecule. Numerous types of competitive binding assays may be used to determine if one antigen binding molecule competes with another, for example: solid phase direct or indirect radioimmunoassay (RIA); solid phase direct or indirect enzyme immunoassay (EIA); sandwich competition assay (Stahli et al., 1983, Methods in Enzymology 9:242-253); solid phase direct biotin-avidin EIA (Kirkland et al., 1986, J. Immunol. 137:3614-3619); solid phase direct labeled assay, solid phase direct labeled sandwich assay (Harlow and Lane, 1988, Antibodies, A Laboratory Manual, Cold Spring Harbor Press); solid phase direct label RIA using 1-125 label (Morel et al., 1988, Molec. Immunol. 25:7-15); solid phase direct biotin-avidin EIA (Cheung, et al., 1990, Virology 176:546-552); and direct labeled RIA (Moldenhauer et al., 1990, Scand. J. Immunol. 32:77-82).

[0256] As used herein, the terms “immunospecifically binds,” “immunospecifically recognizes,” “specifically binds,” and “specifically recognizes” are analogous terms in the context of antibodies and refer to molecules that bind to an antigen (e.g., epitope or immune complex) as such binding is understood by one skilled in the art. For example, a molecule that specifically binds to an antigen may bind to other peptides or polypeptides, generally with lower affinity as determined by, e.g., immunoassays, BIACORE®, KinExA 3000 instrument (Sapidyne Instruments, Boise, ID), or other assays known in the art. In a specific embodiment, molecules that specifically bind to an antigen bind to the antigen with a KA that is at least 2 logs, 2.5 logs, 3 logs, 4 logs or greater than the KA when the molecules bind to another antigen.

[0257] An “antigen” refers to any molecule that provokes an immune response or is capable of being bound by an antibody or an antigen binding molecule. The immune response may involve either antibody production, or the activation of specific immunologically-competent cells, or both. A person of skill in the art would readily understand that any macromolecule, including virtually all proteins or peptides, may serve as an antigen. An antigen may be endogenously expressed, i.e. expressed by genomic DNA, or may be recombinantly expressed. An antigen may be specific to a certain tissue, such as a cancer cell, or it may be broadly expressed. In addition, fragments of larger molecules may act as antigens. In some embodiments, antigens are tumor antigens.

[0258] The term “autologous” refers to any material derived from the same individual to which it is later to be re-introduced. For example, the engineered autologous cell therapy (eACT™) method described herein involves collection of lymphocytes from a patient, which are then engineered to express, e.g., a CAR construct, and then administered back to the same patient.

[0259] The term “allogeneic” refers to any material derived from one individual which is then introduced to another individual of the same species, e.g., allogeneic T cell transplantation.

[0260] A “cancer” refers to a broad group of various diseases characterized by the uncontrolled growth of abnormal cells in the body. Unregulated cell division and growth results in the formation of malignant tumors that invade neighboring tissues and may also metastasize to distant parts of the body through the lymphatic system or bloodstream. A “cancer” or “cancer tissue” may include a tumor. Examples of cancers that may be treated by the methods disclosed herein include, but are not limited to, cancers of the immune system including lymphoma, leukemia, myeloma, and other leukocyte malignancies. In some embodiments, the methods disclosed herein may be used to reduce the tumor size of a tumor derived from, for example, bone cancer, pancreatic cancer, skin cancer, cancer of the head or neck, cutaneous or intraocular malignant melanoma, uterine cancer, ovarian cancer, rectal cancer, cancer of the anal region, stomach cancer, testicular cancer, uterine cancer, multiple myeloma, Hodgkin's Disease, non-Hodgkin's lymphoma (NHL), primary mediastinal large B cell lymphoma (PMBC), diffuse large B cell lymphoma (DLBCL), follicular lymphoma (FL), transformed follicular lymphoma, splenic marginal zone lymphoma (SMZL), cancer of the esophagus, cancer of the small intestine, cancer of the endocrine system, cancer of the thyroid gland, cancer of the parathyroid gland, cancer of the adrenal gland, cancer of the urethra, cancer of the penis, chronic or acute leukemia, acute myeloid leukemia, chronic myeloid leukemia, acute lymphoblastic leukemia (ALL) (including non T cell ALL), chronic lymphocytic leukemia (CLL), solid tumors of childhood, lymphocytic lymphoma, cancer of the bladder, cancer of the kidney or ureter, neoplasm of the central nervous system (CNS), primary CNS lymphoma, tumor angiogenesis, spinal axis tumor, brain stem glioma, pituitary adenoma, epidermoid cancer, squamous cell cancer, T cell lymphoma, environmentally induced cancers including those induced by asbestos, other B cell malignancies, and combinations of said cancers. In some embodiments, the methods disclosed herein may be used to reduce the tumor size of a tumor derived from, for example, sarcomas and carcinomas, fibrosarcoma, myxosarcoma, liposarcoma, chondrosarcoma, osteogenic sarcoma, Kaposi's sarcoma, sarcoma of soft tissue, and other sarcomas, synovioma, mesothelioma, Ewing's tumor, leiomyosarcoma, rhabdomyosarcoma, colon carcinoma, pancreatic cancer, breast cancer, ovarian cancer, prostate cancer, hepatocellular carcinoma, lung cancer, colorectal cancer, squamous cell carcinoma, basal cell carcinoma, adenocarcinoma (for example adenocarcinoma of the pancreas, colon, ovary, lung, breast, stomach, prostate, cervix, or esophagus), sweat gland carcinoma, sebaceous gland carcinoma, papillary carcinoma, papillary adenocarcinomas, medullary carcinoma, bronchogenic carcinoma, renal cell carcinoma, hepatoma, bile duct carcinoma, choriocarcinoma, Wilms' tumor, cervical cancer, testicular tumor, bladder carcinoma, carcinoma of the fallopian tubes, carcinoma of the endometrium, carcinoma of the cervix, carcinoma of the vagina, carcinoma of the vulva, carcinoma of the renal pelvis, CNS tumors (such as a glioma, astrocytoma, medulloblastoma, craniopharyogioma, ependymoma, pinealoma, hemangioblastoma, acoustic neuroma, oligodendroglioma, menangioma, melanoma, neuroblastoma and retinoblastoma). The particular cancer may be responsive to chemo- or radiation therapy or the cancer may be refractory. A refractory cancer refers to a cancer that is not amenable to surgical intervention and the cancer is either initially unresponsive to chemo- or radiation therapy or the cancer becomes unresponsive over time.

[0261] An “anti-tumor effect” as used herein, refers to a biological effect that may present as a decrease in tumor volume, a decrease in the number of tumor cells, a decrease in tumor cell proliferation, a decrease in the number of metastases, an increase in overall or progression-free survival, an increase in life expectancy, or amelioration of various physiological symptoms associated with the tumor. An anti-tumor effect may also refer to the prevention of the occurrence of a tumor, e.g., a vaccine.

[0262] A “cytokine,” as used herein, refers to a non-antibody protein that is released by one cell in response to contact with a specific antigen, wherein the cytokine interacts with a second cell to mediate a response in the second cell. “Cytokine” as used herein is meant to refer to proteins released by one cell population that act on another cell as intercellular mediators. A cytokine may be endogenously expressed by a cell or administered to a subject. Cytokines may be released by immune cells, including macrophages, B cells, T cells, neutrophils, dendritic cells, eosinophils and mast cells to propagate an immune response. Cytokines may induce various responses in the recipient cell. Cytokines may include homeostatic cytokines, chemokines, pro-inflammatory cytokines, effectors, and acute-phase proteins. For example, homeostatic cytokines, including interleukin (IL) 7 and IL-15, promote immune cell survival and proliferation, and pro-inflammatory cytokines may promote an inflammatory response. Examples of homeostatic cytokines include, but are not limited to, IL-2, IL-4, IL-5, IL-7, IL-10, IL-12p40, IL-12p70, IL-15, and interferon (IFN) gamma. Examples of pro-inflammatory cytokines include, but are not limited to, IL-1a, IL-1b, IL-6, IL-13, IL-17a, IL-23, IL-27, tumor necrosis factor (TNF)-alpha, TNF-beta, fibroblast growth factor (FGF) 2, granulocyte macrophage colony-stimulating factor (GM-CSF), soluble intercellular adhesion molecule 1 (sICAM-1), soluble vascular adhesion molecule 1 (sVCAM-1), vascular endothelial growth factor (VEGF), VEGF-C, VEGF-D, and placental growth factor (PLGF). Examples of effectors include, but are not limited to, granzyme A, granzyme B, soluble Fas ligand (sFasL), TGF-beta, IL-35, and perform. Examples of acute phase-proteins include, but are not limited to, C-reactive protein (CRP) and serum amyloid A (SAA).

[0263] The term “lymphocyte” as used herein includes natural killer (NK) cells, T cells, or B cells. NK cells are a type of cytotoxic (cell toxic) lymphocyte that represent a major component of the innate immune system. NK cells reject tumors and cells infected by viruses. It works through the process of apoptosis or programmed cell death. They were termed “natural killers” because they do not require activation in order to kill cells. T cells play a major role in cell-mediated-immunity (no antibody involvement). T cell receptors (TCR) differentiate T cells from other lymphocyte types. The thymus, a specialized organ of the immune system, is the primary site for T cell maturation. There are numerous types of T cells, including: helper T cells (e.g., CD4+ cells), cytotoxic T cells (also known as TC, cytotoxic T lymphocytes, CTL, T-killer cells, cytolytic T cells, CD8+ T cells or killer T cells), memory T cells ((i) stem memory cells (TSCM), like naive cells, are CD45RO−, CCR7+, CD45RA+, CD62L+ (L-selectin), CD27+, CD28+ and IL-7Ra+, but also express large amounts of CD95, IL-2R, CXCR3, and LFA-1, and show numerous functional attributes distinctive of memory cells); (ii) central memory cells (TCM) express L-selectin and CCR7, they secrete IL-2, but not IFNγ or IL-4, and (iii) effector memory cells (TEM), however, do not express L-selectin or CCR7 but produce effector cytokines like IFNγ and IL-4), regulatory T cells (Tregs, suppressor T cells, or CD4+CD25+ or CD4+ FoxP3+ regulatory T cells), natural killer T cells (NKT) and gamma delta T cells. B-cells, on the other hand, play a principal role in humoral immunity (with antibody involvement). B-cells make antibodies, are capable of acting as antigen-presenting cells (APCs) and turn into memory B-cells and plasma cells, both short-lived and long-lived, after activation by antigen interaction. In mammals, immature B-cells are formed in the bone marrow.

[0264] The term “genetically engineered” or “engineered” refers to a method of modifying the genome of a cell, including, but not limited to, deleting a coding or non-coding region or a portion thereof or inserting a coding region or a portion thereof. In some embodiments, the cell that is modified is a lymphocyte, e.g., a T cell, which may either be obtained from a patient or a donor. The cell may be modified to express an exogenous construct, such as, e.g., a chimeric antigen receptor (CAR) or a T cell receptor (TCR), which is incorporated into the cell's genome.

[0265] An “immune response” refers to the action of a cell of the immune system (for example, T lymphocytes, B lymphocytes, natural killer (NK) cells, macrophages, eosinophils, mast cells, dendritic cells and neutrophils) and soluble macromolecules produced by any of these cells or the liver (including Abs, cytokines, and complement) that results in selective targeting, binding to, damage to, destruction of, and/or elimination from a vertebrate's body of invading pathogens, cells or tissues infected with pathogens, cancerous or other abnormal cells, or, in cases of autoimmunity or pathological inflammation, normal human cells or tissues.

[0266] A “costimulatory signal,” as used herein, refers to a signal, which in combination with a primary signal, such as TCR/CD3 ligation, leads to a T cell response, such as, but not limited to, proliferation and/or upregulation or down regulation of key molecules.

[0267] A “costimulatory ligand,” as used herein, includes a molecule on an antigen presenting cell that specifically binds a cognate co-stimulatory molecule on a T cell. Binding of the costimulatory ligand provides a signal that mediates a T cell response, including, but not limited to, proliferation, activation, differentiation, and the like. A costimulatory ligand induces a signal that is in addition to the primary signal provided by a stimulatory molecule, for instance, by binding of a T cell receptor (TCR)/CD3 complex with a major histocompatibility complex (MHC) molecule loaded with peptide. A co-stimulatory ligand may include, but is not limited to, 3/TR6, 4-IBB ligand, agonist or antibody that binds Toll-like receptor, B7-1 (CD80), B7-2 (CD86), CD30 ligand, CD40, CD7, CD70, CD83, herpes virus entry mediator (HVEM), human leukocyte antigen G (HLA-G), ILT4, immunoglobulin-like transcript (ILT) 3, inducible costimulatory ligand (ICOS-L), intercellular adhesion molecule (ICAM), ligand that specifically binds with B7-H3, lymphotoxin beta receptor, MHC class I chain-related protein A (MICA), MHC class I chain-related protein B (MICB), OX40 ligand, PD-L2, or programmed death (PD) LI. A co-stimulatory ligand includes, without limitation, an antibody that specifically binds with a co-stimulatory molecule present on a T cell, such as, but not limited to, 4-1BB, B7-H3, CD2, CD27, CD28, CD30, CD40, CD7, ICOS, ligand that specifically binds with CD83, lymphocyte function-associated antigen-1 (LFA-1), natural killer cell receptor C (NKG2C), OX40, PD-1, or tumor necrosis factor superfamily member 14 (TNFSF14 or LIGHT).

[0268] A “costimulatory molecule” is a cognate binding partner on a T cell that specifically binds with a costimulatory ligand, thereby mediating a costimulatory response by the T cell, such as, but not limited to, proliferation. Costimulatory molecules include, but are not limited to, 4-1BB/CD137, B7-H3, BAFFR, BLAME (SLAMF8), BTLA, CD 33, CD 45, CD100 (SEMA4D), CD103, CD134, CD137, CD154, CD16, CD160 (BY55), CD 18, CD19, CD19a, CD2, CD22, CD247, CD27, CD276 (B7-H3), CD28, CD29, CD3 (alpha; beta; delta; epsilon; gamma; zeta), CD30, CD37, CD4, CD4, CD40, CD49a, CD49D, CD49f, CD5, CD64, CD69, CD7, CD80, CD83 ligand, CD84, CD86, CD8alpha, CD8beta, CD9, CD96 (Tactile), CD1-1a, CD1-1b, CD1-1c, CD1-1d, CDS, CEACAM1, CRT AM, DAP-10, DNAM1 (CD226), Fc gamma receptor, GADS, GITR, HVEM (LIGHTR), IA4, ICAM-1, ICAM-1, ICOS, Ig alpha (CD79a), IL2R beta, IL2R gamma, IL7R alpha, integrin, ITGA4, ITGA4, ITGA6, IT GAD, ITGAE, ITGAL, ITGAM, ITGAX, ITGB2, ITGB7, ITGB1, KIRDS2, LAT, LFA-1, LFA-1, LIGHT, LIGHT (tumor necrosis factor superfamily member 14; TNFSFi4), LTBR, Ly9 (CD229), lymphocyte function-associated antigen-1 (LFA-1 (CD1 1a/CD18), MHC class I molecule, NKG2C, NKG2D, NKp30, NKp44, NKp46, NKp80 (KLRF1), OX40, PAG/Cbp, PD-1, PSGL1, SELPLG (CD162), signaling lymphocytic activation molecule, SLAM (SLAMF1; CD150; IPO-3), SLAMF4 (CD244; 2B4), SLAMF6 (NTB-A; Lyl08), SLAMF7, SLP-76, TNF, TNFr, TNFR2, Toll ligand receptor, TRANCE/RANKL, VLA1, or VLA-6, or fragments, truncations, or combinations thereof.

[0269] The recitations “sequence identity” or, for example, comprising a “sequence 50% identical to,” as used herein, refer to the extent that sequences are identical on a nucleotide-by-nucleotide basis or an amino acid-by-amino acid basis over a window of comparison. Thus, a “percentage of sequence identity” may be calculated by comparing two optimally aligned sequences over the window of comparison, determining the number of positions at which the identical nucleic acid base (e.g., A, T, C, G, U) or the identical amino acid residue (e.g., Ala, Pro, Ser, Thr, Gly, Val, Leu, Ile, Phe, Tyr, Trp, Lys, Arg, His, Asp, Glu, Asn, Gln, Cys and Met) occurs in both sequences to yield the number of matched positions, dividing the number of matched positions by the total number of positions in the window of comparison (i.e. the window size), and multiplying the result by 100 to yield the percentage of sequence identity. Included are nucleotides and polypeptides having at least about 50%, 55%, 60%, 65%, 70%, 75%, 80%, 85%, 90%, 95%, 96%, 97%, 98%, 99% or 100% sequence identity to any of the reference sequences described herein, typically where, in the case of polypeptides, the polypeptide variant maintains at least one biological activity of the reference polypeptide.

[0270] As used herein, a “vaccine” refers to a composition for generating immunity for the prophylaxis and/or treatment of diseases. Accordingly, vaccines are medicaments which comprise antigens and are intended to be used in humans or animals for generating specific defense and protective substances upon administration to the human or animal.

[0271] As used herein, a “neoantigen” refers to a class of tumor antigens which arises from tumor-specific mutations in an expressed protein.

### 2. Vectors, Precursor RNA, and Circular RNA

[0272] Also provided herein are circular RNAs, precursor RNAs that can circularize into the circular RNAs, and vectors (e.g., DNA vectors) that can be transcribed into the precursor RNAs or the circular RNAs.

[0273] In certain aspects, provided herein are circular RNA polynucleotides comprising a post splicing 3′ group I intron fragment, optionally a first spacer, an Internal Ribosome Entry Site (IRES), an expression sequence, optionally a second spacer, and a post splicing 5′ group I intron fragment. In some embodiments, these regions are in that order. In some embodiments, the circular RNA is made by a method provided herein or from a vector provided herein.

[0274] In certain embodiments, transcription of a vector provided herein (e.g., comprising a 5′ duplex forming region, a 3′ group I intron fragment, optionally a first spacer, an Internal Ribosome Entry Site (IRES), a first expression sequence, a polynucleotide sequence encoding a cleavage site, a second expression sequence, optionally a second spacer, a 5′ group I intron fragment, and a 3′ duplex forming region) results in the formation of a precursor linear RNA polynucleotide capable of circularizing. In some embodiments, this precursor linear RNA polynucleotide circularizes when incubated in the presence of guanosine nucleotide or nucleoside (e.g., GTP) and divalent cation (e.g., Mg2+).

[0275] In some embodiments, the vectors and precursor RNA polynucleotides provided herein comprise a first (5′) duplex forming region and a second (3′) duplex forming region. In certain embodiments, the first and second duplex forming regions may form perfect or imperfect duplexes. Thus, in certain embodiments at least 75%, 80%, 85%, 90%, 91%, 92%, 93%, 94%, 95%, 96%, 97%, 98%, 99% or 100% of the first and second duplex forming regions may be base paired with one another. In some embodiments, the duplex forming regions are predicted to have less than 50% (e.g., less than 45%, less than 40%, less than 35%, less than 30%, less than 25%) base pairing with unintended sequences in the RNA (e.g., non-duplex forming region sequences). In some embodiments, including such duplex forming regions on the ends of the precursor RNA strand, and adjacent or very close to the group I intron fragment, bring the group I intron fragments in close proximity to each other, increasing splicing efficiency. In some embodiments, the duplex forming regions are 3 to 100 nucleotides in length (e.g., 3-75 nucleotides in length, 3-50 nucleotides in length, 20-50 nucleotides in length, 35-50 nucleotides in length, 5-25 nucleotides in length, 9-19 nucleotides in length). In some embodiments, the duplex forming regions are about 3, 4, 5, 6, 7, 8, 9, 10, 11, 12, 13, 14, 15, 16, 17, 18, 19, 20, 21, 22, 23, 24, 25, 26, 27, 28, 29, 30, 31, 32, 33, 34, 35, 36, 37, 38, 39, 40, 41, 42, 43, 44, 45, 46, 47, 48, 49 or 50 nucleotides in length. In some embodiments, the duplex forming regions have a length of about 9 to about 50 nucleotides. In one embodiment, the duplex forming regions have a length of about 9 to about 19 nucleotides. In some embodiments, the duplex forming regions have a length of about 20 to about 40 nucleotides. In certain embodiments, the duplex forming regions have a length of about 30 nucleotides.

[0276] Two types of spacers have been designed for improving precursor RNA circularization and/or gene expression from circular RNA. The first type of spacer is external spacer, i.e., present in a precursor RNA but removed upon circularization. While not wishing to be bound by theory, it is contemplated that an external spacer may improve ribozyme-mediated circularization by maintaining the structure of the ribozyme itself and preventing other neighboring sequence elements from interfering with its folding and function. The second type of spacer is internal spacer, i.e., present in a precursor RNA and retained in a resulting circular RNA. While not wishing to be bound by theory, it is contemplated that an internal spacer may improve ribozyme-mediated circularization by maintaining the structure of the ribozyme itself and preventing other neighboring sequence elements, particularly the neighboring IRES and coding region, from interfering with its folding and function. It is also contemplated that an internal spacer may improve protein expression from the IRES by preventing neighboring sequence elements, particularly the intron elements, from hybridizing with sequences within the IRES and inhibiting its ability to fold into its most preferred and active conformation.

[0277] In certain embodiments, the vectors, precursor RNA and circular RNA provided herein comprise a first (5′) and/or a second (3′) spacer. In some embodiments, including a spacer between the 3′ group I intron fragment and the IRES may conserve secondary structures in those regions by preventing them from interacting, thus increasing splicing efficiency. In some embodiments, the first (between 3′ group I intron fragment and IRES) and second (between the expression sequences and 5′ group I intron fragment) spacers comprise additional base pairing regions that are predicted to base pair with each other and not to the first and second duplex forming regions. In some embodiments, such spacer base pairing brings the group I intron fragments in close proximity to each other, further increasing splicing efficiency. Additionally, in some embodiments, the combination of base pairing between the first and second duplex forming regions, and separately, base pairing between the first and second spacers, promotes the formation of a splicing bubble containing the group I intron fragments flanked by adjacent regions of base pairing. Typical spacers are contiguous sequences with one or more of the following qualities: 1) predicted to avoid interfering with proximal structures, for example, the IRES, expression sequences, or intron; 2) is at least 7 nt long and no longer than 100 nt; 3) is located after and adjacent to the 3′ intron fragment and/or before and adjacent to the 5′ intron fragment; and 4) contains one or more of the following: a) an unstructured region at least 5 nt long, b) a region of base pairing at least 5 nt long to a distal sequence, including another spacer, and c) a structured region at least 7 nt long limited in scope to the sequence of the spacer. Spacers may have several regions, including an unstructured region, a base pairing region, a hairpin/structured region, and combinations thereof. In an embodiment, the spacer has a structured region with high GC content. In an embodiment, a region within a spacer base pairs with another region within the same spacer. In an embodiment, a region within a spacer base pairs with a region within another spacer. In an embodiment, a spacer comprises one or more hairpin structures. In an embodiment, a spacer comprises one or more hairpin structures with a stem of 4 to 12 nucleotides and a loop of 2 to 10 nucleotides. In an embodiment, there is an additional spacer between the 3′ group I intron fragment and the IRES. In an embodiment, this additional spacer prevents the structured regions of the IRES from interfering with the folding of the 3′ group I intron fragment or reduces the extent to which this occurs. In some embodiments, the 5′ spacer sequence is at least 7, 8, 9, 10, 11, 12, 13, 14, 15, 16, 17, 18, 19, 20, 25 or 30 nucleotides in length. In some embodiments, the 5′ spacer sequence is no more than 100, 90, 80, 70, 60, 50, 45, 40, 35 or 30 nucleotides in length. In some embodiments the 5′ spacer sequence is between 5 and 50, 10 and 50, 20 and 50, 20 and 40, and/or 25 and 35 nucleotides in length. In certain embodiments, the 5′ spacer sequence is 10, 11, 12, 13, 14, 15, 16, 17, 18, 19, 20, 21, 22, 23, 24, 25, 26, 27, 28, 29, 30, 31, 32, 33, 34, 35, 36, 37, 38, 39, 40, 41, 42, 43, 44, 45, 46, 47, 48, 49 or 50 nucleotides in length. In one embodiment, the 5′ spacer sequence is a polyA sequence. In another embodiment, the 5′ spacer sequence is a polyAC sequence. In one embodiment, a spacer comprises about 10%, 20%, 30%, 40%, 50%, 60%, 70%, 80%, 90%, or 100% polyAC content. In one embodiment, a spacer comprises about 10%, 20%, 30%, 40%, 50%, 60%, 70%, 80%, 90%, or 100% polypyrimidine (C/T or C/U) content.

[0278] In certain embodiments, a 3′ group I intron fragment is a contiguous sequence at least 75% homologous (e.g., at least 80%, 85%, 90%, 91%, 92%, 93%, 94%, 95%, 96%, 97%, 98%, 99% or 100% homologous) to a 3′ proximal fragment of a natural group I intron including the 3′ splice site dinucleotide and optionally the adjacent exon sequence at least 1 nt in length (e.g., at least 2, 3, 4, 5, 6, 7, 8, 9, 10, 15, 20, 25 or 30 nt in length) and at most the length of the exon. Typically, a 5′ group I intron fragment is a contiguous sequence at least 75% homologous (e.g., at least 80%, 85%, 90%, 91%, 92%, 93%, 94%, 95%, 96%, 97%, 98%, 99% or 100% homologous) to a 5′ proximal fragment of a natural group I intron including the 5′ splice site dinucleotide and optionally the adjacent exon sequence at least 1 nt in length (e.g., at least 2, 3, 4, 5, 6, 7, 8, 9, 10, 15, 20, 25 or 30 nt in length) and at most the length of the exon. As described by Umekage et al. (2012), external portions of the 3′ group I intron fragment and 5′ group I intron fragment are removed in circularization, causing the circular RNA provided herein to comprise only the portion of the 3′ group I intron fragment formed by the optional exon sequence of at least 1 nt in length and 5′ group I intron fragment formed by the optional exon sequence of at least 1 nt in length, if such sequences were present on the non-circularized precursor RNA. The part of the 3′ group I intron fragment that is retained by a circular RNA is referred to herein as the “post splicing 3′ group I intron fragment”. The part of the 5′ group I intron fragment that is retained by a circular RNA is referred to herein as the “post splicing 5′ group I intron fragment”.

[0279] In certain embodiments, the vectors, precursor RNA and circular RNA provided herein comprise an internal ribosome entry site (IRES). Inclusion of an IRES permits the translation of one or more open reading frames from a circular RNA (e.g., open reading frames that form the expression sequences). The IRES element attracts a eukaryotic ribosomal translation initiation complex and promotes translation initiation. See, e.g., Kaufman et al., Nuc. Acids Res. (1991) 19:4485-4490; Gurtu et al., Biochem. Biophys. Res. Comm. (1996) 229:295-298; Rees et al., BioTechniques (1996) 20: 102-110; Kobayashi et al., BioTechniques (1996) 21:399-402; and Mosser et al., BioTechniques 1997 22 150-161.

[0280] A multitude of IRES sequences are available and include sequences derived from a wide variety of viruses, such as from leader sequences of picornaviruses such as the encephalomyocarditis virus (EMCV) UTR (Jang et al., J. Virol. (1989) 63: 1651-1660), the polio leader sequence, the hepatitis A virus leader, the hepatitis C virus IRES, human rhinovirus type 2 IRES (Dobrikova et al., Proc. Natl. Acad. Sci. (2003) 100(25): 15125-15130), an IRES element from the foot and mouth disease virus (Ramesh et al., Nucl. Acid Res. (1996) 24:2697-2700), a giardiavirus IRES (Garlapati et al., J. Biol. Chem. (2004) 279(5):3389-3397), and the like.

[0281] In some embodiments, an IRES is an IRES sequence of Taura syndrome virus, Triatoma virus, Theiler's encephalomyelitis virus, Simian Virus 40, Solenopsis invicta virus 1, Rhopalosiphum padi virus, Reticuloendotheliosis virus, Human poliovirus 1, Plautia stali intestine virus, Kashmir bee virus, Human rhinovirus 2, Homalodisca coagulata virus-1, Human Immunodeficiency Virus type 1, Himetobi P virus, Hepatitis C virus, Hepatitis A virus, Hepatitis GB virus, Foot and mouth disease virus, Human enterovirus 71, Equine rhinitis virus, Ectropis obliqua picorna-like virus, Encephalomyocarditis virus, Drosophila C Virus, Human coxsackievirus B3, Crucifer tobamovirus, Cricket paralysis virus, Bovine viral diarrhea virus 1, Black Queen Cell Virus, Aphid lethal paralysis virus, Avian encephalomyelitis virus, Acute bee paralysis virus, Hibiscus chlorotic ringspot virus, Classical swine fever virus, Human FGF2, Human SFTPA1, Human AML1/RUNX1, Drosophila antennapedia, Human AQP4, Human AT1R, Human BAG-1, Human BCL2, Human BiP, Human c-IAPl, Human c-myc, Human eIF4G, Mouse NDST4L, Human LEF1, Mouse HIF1 alpha, Human n.myc, Mouse Gtx, Human p27kip1, Human PDGF2/c-sis, Human p53, Human Pim-1, Mouse Rbm3, Drosophila reaper, Canine Scamper, Drosophila Ubx, Human UNR, Mouse UtrA, Human VEGF-A, Human XIAP, Drosophila hairless, S. cerevisiae TFIID, S. cerevisiae YAP1, tobacco etch virus, turnip crinkle virus, EMCV-A, EMCV-B, EMCV-Bf, EMCV-Cf, EMCV pEC9, Picobirnavirus, HCV QC64, Human Cosavirus E/D, Human Cosavirus F, Human Cosavirus JMY, Rhinovirus NAT001, HRV14, HRV89, HRVC-02, HRV-A21, Salivirus A SH1, Salivirus FHB, Salivirus NG-J1, Human Parechovirus 1, Crohivirus B, Yc-3, Rosavirus M-7, Shanbavirus A, Pasivirus A, Pasivirus A 2, Echovirus E14, Human Parechovirus 5, Aichi Virus, Hepatitis A Virus HA16, Phopivirus, CVA10, Enterovirus C, Enterovirus D, Enterovirus J, Human Pegivirus 2, GBV-C GT110, GBV-C K1737, GBV-C Iowa, Pegivirus A 1220, Pasivirus A 3, Sapelovirus, Rosavirus B, Bakunsa Virus, Tremovirus A, Swine Pasivirus 1, PLV-CHN, Pasivirus A, Sicinivirus, Hepacivirus K, Hepacivirus A, BVDV1, Border Disease Virus, BVDV2, CSFV-PK15C, SF573 Dicistrovirus, Hubei Picorna-like Virus, CRPV, Salivirus A BN5, Salivirus A BN2, Salivirus A 02394, Salivirus A GUT, Salivirus A CH, Salivirus A SZ1, Salivirus FHB, CVB3, CVB1, Echovirus 7, CVB5, EVA71, CVA3, CVA12, EV24 or an aptamer to eIF4G.

[0282] For driving protein expression, the circular RNA comprises an IRES operably linked to a protein coding sequence. Exemplary IRES sequences are provided in Table 17 below. In some embodiments, the circular RNA disclosed herein comprises an IRES sequence at least 80%, 85%, 90%, 91%, 92%, 93%, 94%, 95%, 96%, 97%, 98%, or 99% identical to an IRES sequence in Table 17. In some embodiments, the circular RNA disclosed herein comprises an IRES sequence in Table 17. Modifications of IRES and accessory sequences are disclosed herein to increase or reduce IRES activities, for example, by truncating the 5′ and/or 3′ ends of the IRES, adding a spacer 5′ to the IRES, modifying the 6 nucleotides 5′ to the translation initiation site (Kozak sequence), modification of alternative translation initiation sites, and creating chimeric/hybrid IRES sequences. In some embodiments, the IRES sequence in the circular RNA disclosed herein comprises one or more of these modifications relative to a native IRES (e.g., a native IRES disclosed in Table 17).

[0283] A multitude of IRES sequences are available and include sequences derived from a wide variety of viruses, such as from leader sequences of picornaviruses such as the encephalomyocarditis virus (EMCV) UTR (Jang et al. J. Virol. (1989) 63: 1651-1660), the polio leader sequence, the hepatitis A virus leader, the hepatitis C virus IRES, human rhinovirus type 2 IRES (Dobrikova et al., Proc. Natl. Acad. Sci. (2003) 100(25): 15125-15130), an IRES element from the foot and mouth disease virus (Ramesh et al., Nucl. Acid Res. (1996) 24:2697-2700), a giardiavirus IRES (Garlapati et al., J. Biol. Chem. (2004) 279(5):3389-3397), and the like.

[0284] In some embodiments, the IRES is an IRES sequence of Taura syndrome virus, Triatoma virus, Theiler's encephalomyelitis virus, Simian Virus 40, Solenopsis invicta virus 1, Rhopalosiphum padi virus, Reticuloendotheliosis virus, Human poliovirus 1, Plautia stali intestine virus, Kashmir bee virus, Human rhinovirus 2, Homalodisca coagulata virus-1, Human Immunodeficiency Virus type 1, Himetobi P virus, Hepatitis C virus, Hepatitis A virus, Hepatitis GB virus, Foot and mouth disease virus, Human enterovirus 71, Equine rhinitis virus, Ectropis obliqua picorna-like virus, Encephalomyocarditis virus, Drosophila C Virus, Human coxsackievirus B3, Crucifer tobamovirus, Cricket paralysis virus, Bovine viral diarrhea virus 1, Black Queen Cell Virus, Aphid lethal paralysis virus, Avian encephalomyelitis virus, Acute bee paralysis virus, Hibiscus chlorotic ringspot virus, Classical swine fever virus, Human FGF2, Human SFTPA1, Human AML1/RUNX1, Drosophila antennapedia, Human AQP4, Human AT1R, Human BAG-1, Human BCL2, Human BiP, Human c-IAPl, Human c-myc, Human eIF4G, Mouse NDST4L, Human LEF1, Mouse HIF1 alpha, Human n.myc, Mouse Gtx, Human p27kip1, Human PDGF2/c-sis, Human p53, Human Pim-1, Mouse Rbm3, Drosophila reaper, Canine Scamper, Drosophila Ubx, Human UNR, Mouse UtrA, Human VEGF-A, Human XIAP, Drosophila hairless, S. cerevisiae TFIID, S. cerevisiae YAP1, tobacco etch virus, turnip crinkle virus, EMCV-A, EMCV-B, EMCV-Bf, EMCV-Cf, EMCV pEC9, Picobirnavirus, HCV QC64, Human Cosavirus E/D, Human Cosavirus F, Human Cosavirus JMY, Rhinovirus NAT001, HRV14, HRV89, HRVC-02, HRV-A21, Salivirus A SH1, Salivirus FHB, Salivirus NG-J1, Human Parechovirus 1, Crohivirus B, Yc-3, Rosavirus M-7, Shanbavirus A, Pasivirus A, Pasivirus A 2, Echovirus E14, Human Parechovirus 5, Aichi Virus, Hepatitis A Virus HA16, Phopivirus, CVA10, Enterovirus C, Enterovirus D, Enterovirus J, Human Pegivirus 2, GBV-C GT110, GBV-C K1737, GBV-C Iowa, Pegivirus A 1220, Pasivirus A 3, Sapelovirus, Rosavirus B, Bakunsa Virus, Tremovirus A, Swine Pasivirus 1, PLV-CHN, Pasivirus A, Sicinivirus, Hepacivirus K, Hepacivirus A, BVDV1, Border Disease Virus, BVDV2, CSFV-PK15C, SF573 Dicistrovirus, Hubei Picorna-like Virus, CRPV, Salivirus A BN5, Salivirus A BN2, Salivirus A 02394, Salivirus A GUT, Salivirus A CH, Salivirus A SZ1, Salivirus FHB, CVB3, CVB1, Echovirus 7, CVB5, EVA71, CVA3, CVA12, EV24 or an aptamer to eIF4G.

[0285] In some embodiments, the polynucleotides herein comprise more than one expression sequence. In some embodiments, the circular RNA is a bicistronic RNA. The sequences encoding the two or more polypeptides can be separated by a ribosomal skipping element or a nucleotide sequence encoding a protease cleavage site. In certain embodiments, the ribosomai skipping element encodes thosea-asigna virus 2A peptide (T2A), porcine teschovirus-1 2 A peptide (P2A), foot-and-mouth disease virus 2 A peptide (F2A), equine rhinitis A vims 2A peptide (E2A), cytoplasmic polyhedrosis vims 2A peptide (BmCPV 2A), or flacherie vims of B. mori 2A peptide (BmIFV 2A).

[0286] In certain embodiments, the vectors provided herein comprise a 3′ UTR. In some embodiments, the 3′ UTR is from human beta globin, human alpha globin Xenopus beta globin, Xenopus alpha globin, human prolactin, human GAP-43, human eEFlal, human Tau, human TNFα, dengue virus, hantavirus small mRNA, bunyavirus small mRNA, turnip yellow mosaic virus, hepatitis C virus, rubella virus, tobacco mosaic virus, human IL-8, human actin, human GAPDH, human tubulin, hibiscus chlorotic ringspot virus, woodchuck hepatitis virus post translationally regulated element, sindbis virus, turnip crinkle virus, tobacco etch virus, or Venezuelan equine encephalitis virus.

[0287] In some embodiments, the vectors provided herein comprise a 5′ UTR. In some embodiments, the 5′ UTR is from human beta globin, Xenopus laevis beta globin, human alpha globin, Xenopus laevis alpha globin, rubella virus, tobacco mosaic virus, mouse Gtx, dengue virus, heat shock protein 70 kDa protein 1A, tobacco alcohol dehydrogenase, tobacco etch virus, turnip crinkle virus, or the adenovirus tripartite leader.

[0288] In some embodiments, a vector provided herein comprises a polyA region external of the 3′ and/or 5′ group I intron fragments. In some embodiments the polyA region is at least 15, 30, or 60 nucleotides long. In some embodiments, one or both polyA regions is 15-50 nucleotides long. In some embodiments, one or both polyA regions is 20-25 nucleotides long. The polyA sequence is removed upon circularization. Thus, an oligonucleotide hybridizing with the polyA sequence, such as a deoxythymine oligonucleotide (oligo(dT)) conjugated to a solid surface (e.g., a resin), can be used to separate circular RNA from its precursor RNA. Other sequences can also be disposed 5′ to the 3′ group I intron fragment or 3′ to the 5′ group I intron fragment and a complementary sequence can similarly be used for circular RNA purification.

[0289] In some embodiments, the DNA (e.g., vector), linear RNA (e.g., precursor RNA), and/or circular RNA polynucleotide provided herein is between 300 and 15000, 300 and 14000, 300 and 13000, 300 and 12000, 300 and 11000, 300 and 10000, 400 and 9000, 500 and 8000, 600 and 7000, 700 and 6000, 800 and 5000, 900 and 5000, 1000 and 5000, 1100 and 5000, 1200 and 5000, 1300 and 5000, 1400 and 5000, and/or 1500 and 5000 nucleotides in length. In some embodiments, the polynucleotide is at least 300 nt, 400 nt, 500 nt, 600 nt, 700 nt, 800 nt, 900 nt, 1000 nt, 1100 nt, 1200 nt, 1300 nt, 1400 nt, 1500 nt, 2000 nt, 2500 nt, 3000 nt, 3500 nt, 4000 nt, 4500 nt, 5000 nt, 6000 nt, 7000 nt, 8000 nt, 9000 nt, 10000 nt, 11000 nt, 12000 nt, 13000 nt, 14000 nt, or 15000 nt in length. In some embodiments, the polynucleotide is no more than 3000 nt, 3500 nt, 4000 nt, 4500 nt, 5000 nt, 6000 nt, 7000 nt, 8000 nt, 9000 nt, 10000 nt, 11000 nt, 12000 nt, 13000 nt, 14000 nt, 15000 nt, or 16000 nt in length. In some embodiments, the length of a DNA, linear RNA, and/or circular RNA polynucleotide provided herein is about 300 nt, 400 nt, 500 nt, 600 nt, 700 nt, 800 nt, 900 nt, 1000 nt, 1100 nt, 1200 nt, 1300 nt, 1400 nt, 1500 nt, 2000 nt, 2500 nt, 3000 nt, 3500 nt, 4000 nt, 4500 nt, 5000 nt, 6000 nt, 7000 nt, 8000 nt, 9000 nt, 10000 nt, 11000 nt, 12000 nt, 13000 nt, 14000 nt, or 15000 nt.

[0290] In some embodiments, provided herein is a vector. In certain embodiments, the vector comprises, in the following order, a) a 5′ duplex forming region, b) a 3′ group I intron fragment, c) optionally, a first spacer sequence, d) an IRES, e) a first expression sequence, f) a polynucleotide sequence encoding a cleavage site, g) a second expression sequence, h) optionally, a second spacer sequence, i) a 5′ group I intron fragment, and g) a 3′ duplex forming region. In some embodiments, the vector comprises a transcriptional promoter upstream of the 5′ duplex forming region.

[0291] In some embodiments, provided herein is a vector. In certain embodiments, the vector comprises, in the following order, a) a 5′ duplex forming region, b) a 3′ group I intron fragment, c) optionally, a first spacer sequence, d) a first IRES, e) a first expression sequence, f) a second IRES, g) a second expression sequence, h) optionally, a second spacer sequence, i) a 5′ group I intron fragment, and g) a 3′ duplex forming region. In some embodiments, the vector comprises a transcriptional promoter upstream of the 5′ duplex forming region.

[0292] In some embodiments, provided herein is a precursor RNA. In certain embodiments, the precursor RNA is a linear RNA produced by in vitro transcription of a vector provided herein. In some embodiments, the precursor RNA comprises, in the following order, a) optionally, a 5′ duplex forming region, b) a 3′ group I intron fragment, c) optionally, a first spacer sequence, d) an IRES, e) a first expression sequence, f) a polynucleotide sequence encoding a cleavage site, g) a second expression sequence, h) optionally, a second spacer sequence, i) a 5′ group I intron fragment, and j) optionally, a 3′ duplex forming region. In some embodiments, the precursor RNA comprises, in the following order, a) a 5′ duplex forming region, b) a 3′ group I intron fragment, c) optionally, a first spacer sequence, d) a first IRES, e) a first expression sequence, f) a second IRES, g) a second expression sequence, h) optionally, a second spacer sequence, i) a 5′ group I intron fragment, and j) a 3′ duplex forming region. The precursor RNA can be unmodified, partially modified or completely modified.

[0293] In certain embodiments, provided herein is a circular RNA. In certain embodiments, the circular RNA is a circular RNA produced by a vector provided herein. In some embodiments, the circular RNA is circular RNA produced by circularization of a precursor RNA provided herein. In certain embodiments, transcription of a vector provided herein results in the formation of a precursor linear RNA capable of circularizing. In some embodiments, this precursor linear RNA polynucleotide circularizes when incubated in the presence of guanosine nucleotide or nucleoside (e.g., GTP) and divalent cation (e.g., Mg²⁺). In some embodiments, the circular RNA comprises, in the following sequence, a) a first spacer sequence, b) an IRES, c) a first expression sequence, d) a polynucleotide sequence encoding a cleavage site, e) a second expression sequence, and f) a second spacer sequence. In some embodiments, the circular RNA comprises, in the following sequence, a) a post splicing 3′ group I intron fragment, b) a first spacer sequence, c) an IRES, d) a first expression sequence, e) a polynucleotide sequence encoding a cleavage site, f) a second expression sequence, and g) a second spacer sequence, h) a post splicing 5′ group I intron fragment. In some embodiments, the circular RNA comprises, in the following sequence, a) a first spacer sequence, b) a first IRES, c) a first expression sequence, d) a second IRES, e) a second expression sequence, and f) a second spacer sequence. In some embodiments, the circular RNA further comprises the portion of the 3′ group I intron fragment that is 3′ of the 3′ splice site. In some embodiments, the circular RNA further comprises the portion of the 5′ group I intron fragment that is 5′ of the 5′ splice site. In some embodiments, the circular RNA is at least 500, 600, 700, 800, 900, 1000, 1500, 2000, 2500, 3000, 3500, 4000, 4500, 5000, 6000, 7000, 8000, 9000, 10000, 11000, 12000, 13000, 14000, or 15000 nucleotides in size. The circular RNA can be unmodified, partially modified or completely modified.

[0294] In some embodiments, the vectors and precursor RNA polynucleotides provided herein comprise a first (5′) duplex forming region and a second (3′) duplex forming region. In certain embodiments, the first and second homology regions may form perfect or imperfect duplexes. Thus, in certain embodiments at least 75%, 80%, 85%, 90%, 91%, 92%, 93%, 94%, 95%, 96%, 97%, 98%, 99% or 100% of the first and second duplex forming regions may be base paired with one another. In some embodiments, the duplex forming regions are predicted to have less than 50% (e.g., less than 45%, less than 40%, less than 35%, less than 30%, less than 25%) base pairing with unintended sequences in the RNA (e.g., non-duplex forming region sequences). In some embodiments, including such duplex forming regions on the ends of the precursor RNA strand, and adjacent or very close to the group I intron fragment, bring the group I intron fragments in close proximity to each other, increasing splicing efficiency. In some embodiments, the duplex forming regions are 3 to 100 nucleotides in length (e.g., 3-75 nucleotides in length, 3-50 nucleotides in length, 20-50 nucleotides in length, 35-50 nucleotides in length, 5-25 nucleotides in length, 9-19 nucleotides in length). In some embodiments, the duplex forming regions are about 3, 4, 5, 6, 7, 8, 9, 10, 11, 12, 13, 14, 15, 16, 17, 18, 19, 20, 21, 22, 23, 24, 25, 26, 27, 28, 29, 30, 31, 32, 33, 34, 35, 36, 37, 38, 39, 40, 41, 42, 43, 44, 45, 46, 47, 48, 49 or 50 nucleotides in length. In some embodiments, the duplex forming regions have a length of about 9 to about 50 nucleotides. In one embodiment, the duplex forming regions have a length of about 9 to about 19 nucleotides. In some embodiments, the duplex forming regions have a length of about 20 to about 40 nucleotides. In certain embodiments, the duplex forming regions have a length of about 30 nucleotides.

[0295] In some embodiments, the circular RNA provided herein has higher functional stability than mRNA comprising the same expression sequence. In some embodiments, the circular RNA provided herein has higher functional stability than mRNA comprising the same expression sequence, 5moU modifications, an optimized UTR, a cap, and/or a polyA tail.

[0296] In some embodiments, the circular RNA polynucleotide provided herein has a functional half-life of at least 5 hours, 10 hours, 15 hours, 20 hours. 30 hours, 40 hours, 50 hours, 60 hours, 70 hours or 80 hours. In some embodiments, the circular RNA polynucleotide provided herein has a functional half-life of 5-80, 10-70, 15-60, and/or 20-50 hours. In some embodiments, the circular RNA polynucleotide provided herein has a functional half-life greater than (e.g., at least 1.5-fold greater than, at least 2-fold greater than) that of an equivalent linear RNA polynucleotide encoding the same protein. In some embodiments, functional half-life can be assessed through the detection of functional protein synthesis.

[0297] In certain embodiments, the vectors, precursor RNA and circular RNA provided herein comprise a first (5′) and/or a second (3′) spacer. In some embodiments, including a spacer between the 3′ group I intron fragment and the IRES may conserve secondary structures in those regions by preventing them from interacting, thus increasing splicing efficiency. In some embodiments, the first (between 3′ group I intron fragment and IRES) and second (between the two expression sequences and 5′ group I intron fragment) spacers comprise additional base pairing regions that are predicted to base pair with each other and not to the first and second duplex forming regions. In other embodiments, the first (between 3′ group I intron fragment and IRES) and second (between the one of the expression sequences and 5′ group I intron fragment) spacers comprise additional base pairing regions that are predicted to base pair with each other and not to the first and second duplex forming regions. In some embodiments, such spacer base pairing brings the group I intron fragments in close proximity to each other, further increasing splicing efficiency. Additionally, in some embodiments, the combination of base pairing between the first and second duplex forming regions, and separately, base pairing between the first and second spacers, promotes the formation of a splicing bubble containing the group I intron fragments flanked by adjacent regions of base pairing. Typical spacers are contiguous sequences with one or more of the following qualities: 1) predicted to avoid interfering with proximal structures, for example, the IRES, expression sequence, or intron; 2) is at least 7 nt long and no longer than 100 nt; 3) is located after and adjacent to the 3′ intron fragment and/or before and adjacent to the 5′ intron fragment; and 4) contains one or more of the following: a) an unstructured region at least 5 nt long, b) a region of base pairing at least 5 nt long to a distal sequence, including another spacer, and c) a structured region at least 7 nt long limited in scope to the sequence of the spacer. Spacers may have several regions, including an unstructured region, a base pairing region, a hairpin/structured region, and combinations thereof. In an embodiment, the spacer has a structured region with high GC content. In an embodiment, a region within a spacer base pairs with another region within the same spacer. In an embodiment, a region within a spacer base pairs with a region within another spacer. In an embodiment, a spacer comprises one or more hairpin structures. In an embodiment, a spacer comprises one or more hairpin structures with a stem of 4 to 12 nucleotides and a loop of 2 to 10 nucleotides. In an embodiment, there is an additional spacer between the 3′ group I intron fragment and the IRES. In an embodiment, this additional spacer prevents the structured regions of the IRES from interfering with the folding of the 3′ group I intron fragment or reduces the extent to which this occurs. In some embodiments, the 5′ spacer sequence is at least 7, 8, 9, 10, 11, 12, 13, 14, 15, 16, 17, 18, 19, 20, 25 or 30 nucleotides in length. In some embodiments, the 5′ spacer sequence is no more than 100, 90, 80, 70, 60, 50, 45, 40, 35 or 30 nucleotides in length. In some embodiments the 5′ spacer sequence is between 5 and 50, 10 and 50, 20 and 50, 20 and 40, and/or 25 and 35 nucleotides in length. In certain embodiments, the 5′ spacer sequence is 10, 11, 12, 13, 14, 15, 16, 17, 18, 19, 20, 21, 22, 23, 24, 25, 26, 27, 28, 29, 30, 31, 32, 33, 34, 35, 36, 37, 38, 39, 40, 41, 42, 43, 44, 45, 46, 47, 48, 49 or 50 nucleotides in length. In one embodiment, the 5′ spacer sequence is a polyA sequence. In another embodiment, the 5′ spacer sequence is a polyAC sequence. In one embodiment, a spacer comprises about 10%, 20%, 30%, 40%, 50%, 60%, 70%, 80%, 90%, or 100% polyAC content. In one embodiment, a spacer comprises about 10%, 20%, 30%, 40%, 50%, 60%, 70%, 80%, 90%, or 100% polypyrimidine (C/T or C/U) content.

[0298] In certain embodiments, a 3′ group I intron fragment is a contiguous sequence at least 75% identical (e.g., at least 80%, 85%, 90%, 91%, 92%, 93%, 94%, 95%, 96%, 97%, 98%, 99% or 100% identical) to a 3′ proximal fragment of a natural group I intron including the 3′ splice site dinucleotide and optionally the adjacent exon sequence at least 1 nt in length (e.g., at least 2, 3, 4, 5, 6, 7, 8, 9, 10, 15, 20, 25 or 30 nt in length) and at most the length of the exon. Typically, a 5′ group I intron fragment is a contiguous sequence at least 75% identical (e.g., at least 80%, 85%, 90%, 91%, 92%, 93%, 94%, 95%, 96%, 97%, 98%, 99% or 100% identical) to a 5′ proximal fragment of a natural group I intron including the 5′ splice site dinucleotide and optionally the adjacent exon sequence at least 1 nt in length (e.g., at least 2, 3, 4, 5, 6, 7, 8, 9, 10, 15, 20, 25 or 30 nt in length) and at most the length of the exon. As described by Umekage et al. (2012), external portions of the 3′ group I intron fragment and 5′ group I intron fragment are removed in circularization, causing the circular RNA provided herein to comprise only the portion of the 3′ group I intron fragment formed by the optional exon sequence of at least 1 nt in length and 5′ group I intron fragment formed by the optional exon sequence of at least 1 nt in length, if such sequences were present on the non-circularized precursor RNA. The part of the 3′ group I intron fragment that is retained by a circular RNA is referred to herein as the post splicing 3′ group I intron fragment. The part of the 5′ group I intron fragment that is retained by a circular RNA is referred to herein as the post splicing 5′ group I intron fragment.

[0299] In some embodiments, the circular RNA provided herein may have a higher magnitude of expression than equivalent linear mRNA, e.g., a higher magnitude of expression 24 hours after administration of RNA to cells. In some embodiments, the circular RNA provided herein has a higher magnitude of expression than mRNA comprising the same expression sequence, 5moU modifications, an optimized UTR, a cap, and/or a polyA tail.

[0300] In some embodiments, the circular RNA polynucleotide provided herein has a functional half-life of at least 5 hours, 10 hours, 15 hours, 20 hours. 30 hours, 40 hours, 50 hours, 60 hours, 70 hours or 80 hours. In some embodiments, the circular RNA polynucleotide provided herein has a functional half-life of 5-80, 10-70, 15-60, and/or 20-50 hours. In some embodiments, the circular RNA polynucleotide provided herein has a functional half-life greater than (e.g., at least 1.5-fold greater than, at least 2-fold greater than) that of an equivalent linear RNA polynucleotide encoding the same protein. In some embodiments, functional half-life can be assessed through the detection of functional protein synthesis.

[0301] In some embodiments, the circular RNA polynucleotide provided herein has a half-life of at least 5 hours, 10 hours, 15 hours, 20 hours. 30 hours, 40 hours, 50 hours, 60 hours, 70 hours or 80 hours. In some embodiments, the circular RNA polynucleotide provided herein has a half-life of 5-80, 10-70, 15-60, and/or 20-50 hours. In some embodiments, the circular RNA polynucleotide provided herein has a half-life greater than (e.g., at least 1.5-fold greater than, at least 2-fold greater than) that of an equivalent linear RNA polynucleotide encoding the same protein. In some embodiments, the circular RNA polynucleotide, or pharmaceutical composition thereof, has a functional half-life in a human cell greater than or equal to that of a pre-determined threshold value. In some embodiments the functional half-life is determined by a functional protein assay. For example in some embodiments, the functional half-life is determined by an in vitro luciferase assay, wherein the activity of Gaussia luciferase (GLuc) is measured in the media of human cells (e.g. HepG2) expressing the circular RNA polynucleotide every 1, 2, 6, 12, or 24 hours over 1, 2, 3, 4, 5, 6, 7, or 14 days. In other embodiments, the functional half-life is determined by an in vivo assay, wherein levels of a protein encoded by the expression sequence of the circular RNA polynucleotide are measured in patient serum or tissue samples every 1, 2, 6, 12, or 24 hours over 1, 2, 3, 4, 5, 6, 7, or 14 days. In some embodiments, the pre-determined threshold value is the functional half-life of a reference linear RNA polynucleotide comprising the same expression sequence as the circular RNA polynucleotide.

[0302] In some embodiments, the circular RNA provided herein may have a higher magnitude of expression than equivalent linear mRNA, e.g., a higher magnitude of expression 24 hours after administration of RNA to cells. In some embodiments, the circular RNA provided herein has a higher magnitude of expression than mRNA comprising the same expression sequence, 5moU modifications, an optimized UTR, a cap, and/or a polyA tail.

[0303] In some embodiments, the circular RNA provided herein may be less immunogenic than an equivalent mRNA when exposed to an immune system of an organism or a certain type of immune cell. In some embodiments, the circular RNA provided herein is associated with modulated production of cytokines when exposed to an immune system of an organism or a certain type of immune cell. For example, in some embodiments, the circular RNA provided herein is associated with reduced production of TNFα, RIG-I, IL-2, IL-6, IFNγ, and/or a type 1 interferon, e.g., IFN-β1, when exposed to an immune system of an organism or a certain type of immune cell as compared to mRNA comprising the same expression sequence. In some embodiments, the circular RNA provided herein is associated with less TNFα, RIG-I, IL-2, IL-6, IFNγ, and/or type 1 interferon, e.g., IFN-β1, transcript induction when exposed to an immune system of an organism or a certain type of immune cell as compared to mRNA comprising the same expression sequence. In some embodiments, the circular RNA provided herein is less immunogenic than mRNA comprising the same expression sequences. In some embodiments, the circular RNA provided herein is less immunogenic than mRNA comprising the same expression sequences, 5moU modifications, an optimized UTR, a cap, and/or a polyA tail.

[0304] In some embodiments, the compositions and methods described herein provide RNA (e.g., circRNA) with higher stability or functional stability than an equivalent linear RNA without the need for nucleoside modifications. In some embodiments, methods for producing RNA lacking nucleoside modifications produce higher percentages of full length transcripts than methods for producing RNA containing nucleoside modifications due to reduced abortive transcription. In some embodiments, the compositions and methods described herein are capable of producing large (e.g., 5 kb, 6 kb, 7 kb, 8 kb, 9 kb, 10 kb, 11 kb, 12 kb, 13 kb, 14 kb, or 15 kb) RNA constructs without the added abortive transcription associated with RNA containing nucleoside modifications.

[0305] In certain embodiments, the circular RNA provided herein can be transfected into a cell as is, or can be transfected in DNA vector form and transcribed in the cell. Transcription of circular RNA from a transfected DNA vector can be via added polymerases or polymerases encoded by nucleic acids transfected into the cell, or preferably via endogenous polymerases.

[0306] In certain embodiments, a circular RNA polynucleotide provided herein comprises modified RNA nucleotides and/or modified nucleosides. In some embodiments, the modified nucleoside is m⁵C (5-methylcytidine). In another embodiment, the modified nucleoside is m⁵U (5-methyluridine). In another embodiment, the modified nucleoside is m⁶A (N⁶-methyladenosine). In another embodiment, the modified nucleoside is s²U (2-thiouridine). In another embodiment, the modified nucleoside is Ψ (pseudouridine). In another embodiment, the modified nucleoside is Um (2′-O-methyluridine). In other embodiments, the modified nucleoside is m¹A (1-methyladenosine); m²A (2-methyladenosine); Am (2′-O-methyladenosine); ms² m⁶A (2-methylthio-N⁶-methyladenosine); i⁶A (N⁶-isopentenyladenosine); ms²i6A (2-methylthio-N⁶ isopentenyladenosine); io⁶A (N⁶-(cis-hydroxyisopentenyl)adenosine); ms²io⁶A (2-methylthio-N⁶-(cis-hydroxyisopentenyl)adenosine); g⁶A (N⁶-glycinylcarbamoyladenosine); t⁶A (N⁶-threonylcarbamoyladenosine); ms²t⁶A (2-methylthio-N⁶-threonyl carbamoyladenosine); m⁶t⁶A (N⁶-methyl-N⁶-threonylcarbamoyladenosine); hn⁶A(N⁶-hydroxynorvalylcarbamoyladenosine); ms²hn⁶A (2-methylthio-N⁶-hydroxynorvalyl carbamoyladenosine); Ar(p) (2′-O-ribosyladenosine (phosphate)); I (inosine); m¹I (1-methylinosine); m¹Im (1,2′-O-dimethylinosine); m³C (3-methylcytidine); Cm (2′-O-methylcytidine); s²C (2-thiocytidine); ac⁴C (N⁴-acetylcytidine); f⁵C (5-formylcytidine); m⁵Cm (5,2′-O-dimethylcytidine); ac⁴Cm (N⁴-acetyl-2′-O-methylcytidine); k²C (lysidine); m¹G (1-methylguanosine); m²G (N²-methylguanosine); m⁷G (7-methylguanosine); Gm (2′-O-methylguanosine); m² 2G (N²,N²-dimethylguanosine); m²Gm (N²,2′-O-dimethylguanosine); m²₂Gm (N²,N²,2′-O-trimethylguanosine); Gr(p) (2′-O-ribosylguanosine(phosphate)); yW (wybutosine); o₂yW (peroxywybutosine); OHyW (hydroxywybutosine); OHyW* (undermodified hydroxywybutosine); imG (wyosine); mimG (methylwyosine); Q (queuosine); oQ (epoxyqueuosine); galQ (galactosyl-queuosine); manQ (mannosyl-queuosine); preQ₀ (7-cyano-7-deazaguanosine); preQ₁ (7-aminomethyl-7-deazaguanosine); G (archaeosine); D (dihydrouridine); m⁵Um (5,2′-O-dimethyluridine); s⁴U (4-thiouridine); m⁵s²U (5-methyl-2-thiouridine); s²Um (2-thio-2′-O-methyluridine); acp³U (3-(3-amino-3-carboxypropyl)uridine); ho⁵U (5-hydroxyuridine); mo⁵U (5-methoxyuridine); cmo⁵U (uridine 5-oxyacetic acid); mcmo⁵U (uridine 5-oxyacetic acid methyl ester); chm⁵U (5-(carboxyhydroxymethyl)uridine)); mchm⁵U (5-(carboxyhydroxymethyl)uridine methyl ester); mcm⁵U (5-methoxycarbonylmethyluridine); mcm⁵Um (5-methoxycarbonylmethyl-2′-O-methyluridine); mcm⁵s²U (5-methoxycarbonylmethyl-2-thiouridine); nm⁵S2U (5-aminomethyl-2-thiouridine); mnm⁵U (5-methylaminomethyluridine); mnm⁵s²U (5-methylaminomethyl-2-thiouridine); mnm⁵se²U (5-methylaminomethyl-2-selenouridine); ncm⁵U (5-carbamoylmethyluridine); ncm⁵Um (5-carbamoylmethyl-2′-O-methyluridine); cmnm⁵U (5-carboxymethylaminomethyluridine); cmnm⁵Um (5-carboxymethylaminomethyl-2′-O-methyluridine); cmnm⁵s2U (5-carboxymethylaminomethyl-2-thiouridine); m⁶₂A (N⁶,N⁶-dimethyladenosine); Im (2′-O-methylinosine); m⁴C (N⁴-methylcytidine); m⁴Cm (N⁴,2′-O-dimethylcytidine); hm⁵C (5-hydroxymethylcytidine); m³U (3-methyluridine); cm⁵U (5-carboxymethyluridine); m⁶Am (N⁶,2′-O-dimethyladenosine); m⁶₂Am (N⁶,N⁶,O-2′-trimethyladenosine); m^{2,7}G (N²,7-dimethylguanosine); m²,2′⁷G (N²,N²,7-trimethylguanosine); m³Um (3,2′-O-dimethyluridine); m⁵D (5-methyldihydrouridine); f⁵Cm (5-formyl-2′-O-methylcytidine); m¹Gm (1,2′-O-dimethylguanosine); m¹Am (1,2′-O-dimethyladenosine); τm⁵U (5-taurinomethyluridine); τm⁵s2U (5-taurinomethyl-2-thiouridine)); imG-14 (4-demethylwyosine); imG2 (isowyosine); or ac⁶A (N⁶-acetyladenosine).

[0307] In some embodiments, the modified nucleoside may include a compound selected from the group of pyridin-4-one ribonucleoside, 5-aza-uridine, 2-thio-5-aza-uridine, 2-thiouridine, 4-thio-pseudouridine, 2-thio-pseudouridine, 5-hydroxyuridine, 3-methyluridine, 5-carboxymethyl-uridine, 1-carboxymethyl-pseudouridine, 5-propynyl-uridine, 1-propynyl-pseudouridine, 5-taurinomethyluridine, 1-taurinomethyl-pseudouridine, 5-taurinomethyl-2-thio-uridine, 1-taurinomethyl-4-thio-uridine, 5-methyl-uridine, 1-methyl-pseudouridine, 4-thio-1-methyl-pseudouridine, 2-thio-1-methyl-pseudouridine, 1-methyl-1-deaza-pseudouridine, 2-thio-1-methyl-1-deaza-pseudouridine, dihydrouridine, dihydropseudouridine, 2-thio-dihydrouridine, 2-thio-dihydropseudouridine, 2-methoxyuridine, 2-methoxy-4-thio-uridine, 4-methoxy-pseudouridine, 4-m ethoxy-2-thio-pseudouridine, 5-aza-cytidine, pseudoisocytidine, 3-methyl-cytidine, N4-acetylcytidine, 5-formylcytidine, N4-methylcytidine, 5-hydroxymethylcytidine, 1-methyl-pseudoisocytidine, pyrrolo-cytidine, pyrrolo-pseudoisocytidine, 2-thio-cytidine, 2-thio-5-methyl-cytidine, 4-thio-pseudoisocytidine, 4-thio-1-methyl-pseudoisocytidine, 4-thio-1-methyl-1-deaza-pseudoisocytidine, 1-methyl-1-deaza-pseudoisocytidine, zebularine, 5-aza-zebularine, 5-methyl-zebularine, 5-aza-2-thio-zebularine, 2-thio-zebularine, 2-methoxy-cytidine, 2-methoxy-5-methyl-cytidine, 4-methoxy-pseudoisocytidine, 4-methoxy-1-methyl-pseudoisocytidine, 2-aminopurine, 2,6-diaminopurine, 7-deaza-adenine, 7-deaza-8-aza-adenine, 7-deaza-2-aminopurine, 7-deaza-8-aza-2-aminopurine, 7-deaza-2,6-diaminopurine, 7-deaza-8-aza-2,6-diaminopurine, 1-methyladenosine, N6-methyladenosine, N6-isopentenyladenosine, N6-(cis-hydroxyisopentenyl)adenosine, 2-methylthio-N6-(cis-hydroxyisopentenyl) adenosine, N6-glycinylcarbamoyladenosine, N6-threonylcarbamoyladenosine, 2-methylthio-N6-threonyl carbamoyladenosine, N6,N6-dimethyladenosine, 7-methyladenine, 2-methylthio-adenine, 2-methoxy-adenine, inosine, 1-methyl-inosine, wyosine, wybutosine, 7-deaza-guanosine, 7-deaza-8-aza-guanosine, 6-thio-guanosine, 6-thio-7-deaza-guanosine, 6-thio-7-deaza-8-aza-guanosine, 7-methyl-guanosine, 6-thio-7-methyl-guanosine, 7-methylinosine, 6-methoxy-guanosine, 1-methylguanosine, N2-methylguanosine, N2,N2-dimethylguanosine, 8-oxo-guanosine, 7-methyl-8-oxo-guanosine, 1-methyl-6-thio-guanosine, N2-methyl-6-thio-guanosine, and N2,N2-dimethyl-6-thio-guanosine. In another embodiment, the modifications are independently selected from the group consisting of 5-methylcytosine, pseudouridine and 1-methylpseudouridine.

[0308] In some embodiments, the modified ribonucleosides include 5-methylcytidine, 5-methoxyuridine, 1-methyl-pseudouridine, N6-methyladenosine, and/or pseudouridine. In some embodiments, such modified nucleosides provide additional stability and resistance to immune activation.

[0309] In particular embodiments, polynucleotides may be codon-optimized. A codon optimized sequence may be one in which codons in a polynucleotide encoding a polypeptide have been substituted in order to increase the expression, stability and/or activity of the polypeptide. Factors that influence codon optimization include, but are not limited to one or more of: (i) variation of codon biases between two or more organisms or genes or synthetically constructed bias tables, (ii) variation in the degree of codon bias within an organism, gene, or set of genes, (iii) systematic variation of codons including context, (iv) variation of codons according to their decoding tRNAs, (v) variation of codons according to GC %, either overall or in one position of the triplet, (vi) variation in degree of similarity to a reference sequence for example a naturally occurring sequence, (vii) variation in the codon frequency cutoff, (viii) structural properties of mRNAs transcribed from the DNA sequence, (ix) prior knowledge about the function of the DNA sequences upon which design of the codon substitution set is to be based, and/or (x) systematic variation of codon sets for each amino acid. In some embodiments, a codon optimized polynucleotide may minimize ribozyme collisions and/or limit structural interference between the expression sequence and the IRES.

[0310] In certain embodiments circular RNA provided herein is produced inside a cell. In some embodiments, precursor RNA is transcribed using a DNA template (e.g., in some embodiments, using a vector provided herein) in the cytoplasm by a bacteriophage RNA polymerase, or in the nucleus by host RNA polymerase II and then circularized.

[0311] In certain embodiments, the circular RNA provided herein is injected into an animal (e.g., a human), such that a polypeptide encoded by the circular RNA molecule is expressed inside the animal.

### 3. Payload

[0312] In some embodiments, the first expression sequence encodes a therapeutic protein. In some embodiments, the second expression sequence encodes a therapeutic protein. In some embodiments, one or both of the therapeutic proteins are selected from the proteins listed in the following table.

| | | Target | |
|---|---|---|---|
| | | cell/ | |
| Payload | Sequence | organ | Preferred delivery formulation |
| CD19 CAR | Any of sequences 309-314 | T cells | [chemical structure] |
| | | | (50 mol %) |
| | | | DSPC (10 mol %) |
| | | | Beta-sitosterol (28.5% mol %) |
| | | | Cholesterol (10 mol %) |
| | | | PEG DMG (1.5 mol %) |
| BCMA CAR | MALPVTALLLPLALLL HAARPDIVLTQSPASLA VSLGERATINCRASESV SVIGAHLIHWYQQKPG QPPKLLIYLASNLETGV PARFSGSGSGTDFTLTIS SLQAEDAAIYYCLQSRI FPRTFGQGTKLEIKGST SGSGKPGSGEGSTKGQ VQLVQSGSELKKPGAS | T cells | [chemical structure] |
| | VKVSCKASGYTFTDYSI | | (50 mol %) |
| | NWVRQAPGQGLEWMG | | DSPC (10 mol %) |
| | WINTETREPAYAYDFR | | Beta-sitosterol (28.5% mol %) |
| | GRFVFSLDTSVSTAYLQ | | Cholesterol (10 mol %) |
| | ISSLKAEDTAVYYCAR | | PEG DMG (1.5 mol %) |
| | DYSYAMDYWGQGTLV | | |
| | TVSSAAATTTPAPRPPT | | |
| | PAPTIASQPLSLRPEACR | | |
| | PAAGGAVHTRGLDFAC | | |
| | DIYIWAPLAGTCGVLLL | | |
| | SLVITLYCKRGRKKLLY | | |
| | IFKQPFRPVQTTQEED | | |
| | GCSCRFPEEEEGGCELR | | |
| | VKFSRSADAPAYQQGQ | | |
| | NQLYNELNLGRREEYD | | |
| | VLDKRRGRDPEMGGKP | | |
| | RRKNPQEGLYNELQKD | | |
| | KMAEAYSEIGMKGERR | | |
| | RGKGHDGLYQGLSTAT | | |
| | KDTYDALHMQALPPR | | |
| MAGE- A4 TCR | TCR alpha chain: KNQVEQSPQSLIILEGK NCTLQCNYTVSPFSNLR WYKQDTGRGPVSLTIM TFSENTKSNGRYTATLD ADTKQSSLHITASQLSD SASYICVVNHSGGSYIP TFGRGTSLIVHPYIQKP DPAVYQLRDSKSSDKS VCLFTDFDSQTNVSQSK | T cells | [chemical structure] |
| | DSDVYITDKTVLDMRS | | (50 mol %) |
| | MDFKSNSAVAWSNKS | | DSPC (10 mol %) |
| | DFACANAFNNSIIPEDT | | Beta-sitosterol (28.5% mol %) |
| | FFPSPESS | | Cholesterol (10 mol %) |
| | TCR beta chain: | | PEG DMG (1.5 mol %) |
| | DVKVTQSSRYLVKRTG | | |
| | EKVFLECVQDMDHEN | | |
| | MFWYRQDPGLGLRLIY | | |
| | FSYDVKMKEKGDIPEG | | |
| | YSVSREKKERFSLILES | | |
| | ASTNQTSMYLCASSFL | | |
| | MTSGDPYEQYFGPGTR | | |
| | LTVTEDLKNVFPPEVA | | |
| | VFEPSEAEISHTQKATL | | |
| | VCLATGFYPDHVELSW | | |
| | WVNGKEVHSGVSTDPQ | | |
| | PLKEQPALNDSRYCLSS | | |
| | RLRVSATFWQNPRNHF | | |
| | RCQVQFYGLSENDEWT | | |
| | QDRAKPVTQIVSAEAW | | |
| | GRAD | | |
| NY- ESO TCR | TCRalpha extracellular sequence MQEVTQIPAALSVPEGE NLVLNCSFTDSAIYNLQ WFRQDPGKGLTSLLLIQ SSQREQTSGRLNASLDK SSGRSTLYIAASQPGDS ATYLCAVRPTSGGSYIP TFGRGTSLIVHPY TCRbeta extracellular | T cells | [chemical structure] |
| | sequence | | (50 mol %) |
| | MGVTQTPKFQVLKTGQ | | DSPC (10 mol %) |
| | SMTLQCAQDMNHEYM | | Beta-sitosterol (28.5% mol %) |
| | SWYRQDPGMGLRLIHY | | Cholesterol (10 mol %) |
| | SVGAGITDQGEVPNGY | | PEG DMG (1.5 mol %) |
| | NVSRSTTEDFPLRLLSA | | |
| | APSQTSVYFCASSYVG | | |
| | NTGELFFGEGSRLTVL | | |
| EPO | APPRLICDSRVLERYLL | Kidney | |
| | EAKEAENITTGCAEHCS | or bone | |
| | LNENITVPDTKVNFYA | marrow | |
| | WKRMEVGQQAVEVW | | |
| | QGLALLSEAVLRGQAL | | |
| | LVNSSQPWEPLQLHVD | | |
| | KAVSGLRSLTTLLRALG | | |
| | AQKEAISPPDAASAAPL | | |
| | RTITADTFRKLFRVYSN | | |
| | FLRGKLKLYTGEACRT | | |
| | GDR | | |
| PAH | MSTAVLENPGLGRKLS DFGQETSYIEDNCNQN GAISLIFSLKEEVGALA KVLRLFEENDVNLTHIE SRPSRLKKDEYEFFTHL DKRSLPALTNIIKILRHD IGATVHELSRDKKKDT VPWFPRTIQELDRFANQ ILSYGAELDADHPGFKD PVYRARRKQFADIAYN YRHGQPIPRVEYMEEE | Hepatic cells | [chemical structure] |
| | KKTWGTVFKTLKSLYK | | (50 mol %) |
| | THACYEYNHIFPLLEKY | | DSPC (10 mol %) |
| | CGFHEDNIPQLEDVSQF | | Cholesterol (38.5% mol %) |
| | LQTCTGFRLRPVAGLLS | | PEG-DMG (1.5%) |
| | SRDFLGGLAFRVFHCT | | OR |
| | QYIRHGSKPMYTPEPDI | | MC3 (50 mol %) |
| | CHELLGHVPLFSDRSFA | | DSPC (10 mol %) |
| | QFSQEIGLASLGAPDEY | | Cholesterol (38.5% mol %) |
| | IEKLATIYWFTVEFGLC | | PEG-DMG (1.5%) |
| | KQGDSIKAYGAGLLSSF | | |
| | GELQYCLSEKPKLLPLE | | |
| | LEKTAIQNYTVTEFQPL | | |
| | YYVAESFNDAKEKVRN | | |
| | FAATIPRPFSVRYDPYT | | |
| | QRIEVLDNTQQLKILAD | | |
| | SINSEIGILCSALQKIK | | |
| CPS1 | LSVKAQTAHIVLEDGT KMKGYSFGHPSSVAGE VVFNTGLGGYPEAITDP AYKGQILTMANPIIGNG GAPDTTALDELGLSKY LESNGIKVSGLLVLDYS KDYNHWLATKSLGQW LQEEKVPAIYGVDTRM LTKIIRDKGTMLGKIEF EGQPVDFVDPNKQNLI AEVSTKDVKVYGKGNP | Hepatic cells | [chemical structure] |
| | TKVVAVDCGIKNNVIR | | (50 mol %) |
| | LLVKRGAEVHLVPWN | | DSPC (10 mol %) |
| | HDFTKMEYDGILIAGGP | | Cholesterol (38.5% mol %) |
| | GNPALAEPLIQNVRKIL | | PEG-DMG (1.5%) |
| | ESDRKEPLFGISTGNLIT | | OR |
| | GLAAGAKTYKMSMAN | | MC3 (50 mol %) |
| | RGQNQPVLNITNKQAFI | | DSPC (10 mol %) |
| | TAQNHGYALDNTLPAG | | Cholesterol (38.5% mol %) |
| | WKPLFVNVNDQTNEGI | | PEG-DMG (1.5%) |
| | MHESKPFFAVQFHPEV | | |
| | TPGPIDTEYLFDSFFSLI | | |
| | KKGKATTITSVLPKPAL | | |
| | VASRVEVSKVLILGSGG | | |
| | LSIGQAGEFDYSGSQAV | | |
| | KAMKEENVKTVLMNP | | |
| | NIASVQTNEVGLKQAD | | |
| | TVYFLPITPQFVTEVIKA | | |
| | EQPDGLILGMGGQTAL | | |
| | NCGVELFKRGVLKEYG | | |
| | VKVLGTSVESIMATED | | |
| | RQLFSDKLNEINEKIAPS | | |
| | FAVESIEDALKAADTIG | | |
| | YPVMIRSAYALGGLGS | | |
| | GICPNRETLMDLSTKAF | | |
| | AMTNQILVEKSVTGWK | | |
| | EIEYEVVRDADDNCVT | | |
| | VCNMENVDAMGVHTG | | |
| | DSVVVAPAQTLSNAEF | | |
| | QMLRRTSINVVRHLGIV | | |
| | GECNIQFALHPTSMEYC | | |
| | IIEVNARLSRSSALASK | | |
| | ATGYPLAFIAAKIALGIP | | |
| | LPEIKNVVSGKTSACFE | | |
| | PSLDYMVTKIPRWDLD | | |
| | RFHGTSSRIGSSMKSVG | | |
| | EVMAIGRTFEESFQKAL | | |
| | RMCHPSIEGFTPRLPMN | | |
| | KEWPSNLDLRKELSEPS | | |
| | STRIYAIAKAIDDNMSL | | |
| | DEIEKLTYIDKWFLYK | | |
| | MRDILNMEKTLKGLNS | | |
| | ESMTEETLKRAKEIGFS | | |
| | DKQISKCLGLTEAQTRE | | |
| | LRLKKNIHPWVKQIDTL | | |
| | AAEYPSVTNYLYVTYN | | |
| | GQEHDVNFDDHGMMV | | |
| | LGCGPYHIGSSVEFDW | | |
| | CAVSSIRTLRQLGKKTV | | |
| | VVNCNPETVSTDFDEC | | |
| | DKLYFEELSLERILDIYH | | |
| | QEACGGCIISVGGQIPN | | |
| | NLAVPLYKNGVKIMGT | | |
| | SPLQIDRAEDRSIFSAVL | | |
| | DELKVAQAPWKAVNT | | |
| | LNEALEFAKSVDYPCLL | | |
| | RPSYVLSGSAMNVVFS | | |
| | EDEMKKFLEEATRVSQ | | |
| | EHPVVLTKFVEGAREV | | |
| | EMDAVGKDGRVISHAI | | |
| | SEHVEDAGVHSGDATL | | |
| | MLPTQTISQGAIEKVKD | | |
| | ATRKIAKAFAISGPFNV | | |
| | QFLVKGNDVLVIECNL | | |
| | RASRSFPFVSKTLGVDF | | |
| | IDVATKVMIGENVDEK | | |
| | HLPTLDHPIIPADYVAIK | | |
| | APMFSWPRLRDADPILR | | |
| | CEMASTGEVACFGEGI | | |
| | HTAFLKAMLSTGFKIPQ | | |
| | KGILIGIQQSFRPRFLGV | | |
| | AEQLHNEGFKLFATEA | | |
| | TSDWLNANNVPATPVA | | |
| | WPSQEGQNPSLSSIRKLI | | |
| | RDGSIDLVINLPNNNTK | | |
| | FVHDNYVIRRTAVDSGI | | |
| | PLLTNFQVTKLFAEAV | | |
| | QKSRKVDSKSLFHYRQ | | |
| | YSAGKAA | | |
| Cas9 | MKRNYILGLDIGITSVG YGIIDYETRDVIDAGVR LFKEANVENNEGRRSK RGARRLKRRRRHRIQR VKKLLFDYNLLTDHSE LSGINPYEARVKGLSQK LSEEEFSAALLHLAKRR GVHNVNEVEEDTGNEL STKEQISRNSKALEEKY VAELQLERLKKDGEVR | Immune cells | [chemical structure] |
| | GSINRFKTSDYVKEAK | | (50 mol %) |
| | QLLKVQKAYHQLDQSF | | DSPC (10 mol %) |
| | IDTYIDLLETRRTYYEG | | Beta-sitosterol (28.5% mol %) |
| | PGEGSPFGWKDIKEWY | | Cholesterol (10 mol %) |
| | EMLMGHCTYFPEELRS | | PEG DMG (1.5 mol %) |
| | VKYAYNADLYNALND | | |
| | LNNLVITRDENEKLEYY | | |
| | EKFQIIENVFKQKKKPT | | |
| | LKQIAKEILVNEEDIKG | | |
| | YRVTSTGKPEFTNLKV | | |
| | YHDIKDITARKEIIENAE | | |
| | LLDQIAKILTIYQSSEDI | | |
| | QEELTNLNSELTQEEIE | | |
| | QISNLKGYTGTHNLSLK | | |
| | AINLILDELWHTNDNQI | | |
| | AIFNRLKLVPKKVDLSQ | | |
| | QKEIPTTLVDDFILSPVV | | |
| | KRSFIQSIKVINAIIKKY | | |
| | GLPNDIIIELAREKNSKD | | |
| | AQKMINEMQKRNRQT | | |
| | NERIEEIIRTTGKENAKY | | |
| | LIEKIKLHDMQEGKCLY | | |
| | SLEAIPLEDLLNNPFNY | | |
| | EVDHIIPRSVSFDNSFNN | | |
| | KVLVKQEENSKKGNRT | | |
| | PFQYLSSSDSKISYETFK | | |
| | KHILNLAKGKGRISKTK | | |
| | KEYLLEERDINRFSVQK | | |
| | DFINRNLVDTRYATRG | | |
| | LMNLLRSYFRVNNLDV | | |
| | KVKSINGGFTSFLRRK | | |
| | WKFKKERNKGYKHHA | | |
| | EDALIIANADFIFKEWK | | |
| | KLDKAKKVMENQMFE | | |
| | EKQAESMPEIETEQEYK | | |
| | EIFITPHQIKHIKDFKDY | | |
| | KYSHRVDKKPNRELIN | | |
| | DTLYSTRKDDKGNTLI | | |
| | VNNLNGLYDKDNDKL | | |
| | KKLINKSPEKLLMYHH | | |
| | DPQTYQKLKLIMEQYG | | |
| | DEKNPLYKYYEETGNY | | |
| | LTKYSKKDNGPVIKKIK | | |
| | YYGNKLNAHLDITDDY | | |
| | PNSRNKVVKLSLKPYR | | |
| | FDVYLDNGVYKFVTVK | | |
| | NLDVIKKENYYEVNSK | | |
| | CYEEAKKLKKISNQAEF | | |
| | IASFYNNDLIKINGELY | | |
| | RVIGVNNDLLNRIEVN | | |
| | MIDITYREYLENMNDK | | |
| | RPPRIIKTIASKTQSIKK | | |
| | YSTDILGNLYEVKSKK | | |
| | HPQIIKKG | | |
| ADAM TS13 | AAGGILHLELLVAVGP DVFQAHQEDTERYVLT NLNIGAELLRDPSLGAQ FRVHLVKMVILTEPEG APNITANLTSSLLSVCG WSQTINPEDDTDPGHA DLVLYITRFDLELPDGN RQVRGVTQLGGACSPT WSCLITEDTGFDLGVTI AHEIGHSFGLEHDGAPG SGCGPSGHVMASDGAA | Hepatic cells | [chemical structure] |
| | PRAGLAWSPCSRRQLL | | (50 mol %) |
| | SLLSAGRARCVWDPPR | | DSPC (10 mol %) |
| | PQPGSAGHPPDAQPGL | | Cholesterol (38.5% mol %) |
| | YYSANEQCRVAFGPKA | | PEG-DMG (1.5%) |
| | VACTFAREHLDMCQAL | | OR |
| | SCHTDPLDQSSCSRLLV | | MC3 (50 mol %) |
| | PLLDGTECGVEKWCSK | | DSPC (10 mol %) |
| | GRCRSLVELTPIAAVHG | | Cholesterol (38.5% mol %) |
| | RWSSWGPRSPCSRSCG | | PEG-DMG (1.5%) |
| | GGVVTRRRQCNNPRPA | | |
| | FGGRACVGADLQAEM | | |
| | CNTQACEKTQLEFMSQ | | |
| | QCARTDGQPLRSSPGG | | |
| | ASFYHWGAAVPHSQG | | |
| | DALCRHMCRAIGESFIM | | |
| | KRGDSFLDGTRCMPSG | | |
| | PREDGTLSLCVSGSCRT | | |
| | FGCDGRMDSQQVWDR | | |
| | CQVCGGDNSTCSPRKG | | |
| | SFTAGRAREYVTFLTVT | | |
| | PNLTSVYIANHRPLFTH | | |
| | LAVRIGGRYVVAGKMS | | |
| | ISPNTTYPSLLEDGRVE | | |
| | YRVALTEDRLPRLEEIRI | | |
| | WGPLQEDADIQVYRRY | | |
| | GEEYGNLTRPDITFTYF | | |
| | QPKPRQAWVWAAVRG | | |
| | PCSVSCGAGLRWVNYS | | |
| | CLDQARKELVETVQCQ | | |
| | GSQQPPAWPEACVLEP | | |
| | CPPYWAVGDFGPCSAS | | |
| | CGGGLRERPVRCVEAQ | | |
| | GSLLKTLPPARCRAGA | | |
| | QQPAVALETCNPQPCP | | |
| | ARWEVSEPSSCTSAGG | | |
| | AGLALENETCVPGADG | | |
| | LEAPVTEGPGSVDEKLP | | |
| | APEPCVGMSCPPGWGH | | |
| | LDATSAGEKAPSPWGSI | | |
| | RTGAQAAHVWTPAAG | | |
| | SCSVSCGRGLMELRFLC | | |
| | MDSALRVPVQEELCGL | | |
| | ASKPGSRREVCQAVPC | | |
| | PARWQYKLAACSVSCG | | |
| | RGVVRRILYCARAHGE | | |
| | DDGEEILLDTQCQGLPR | | |
| | PEPQEACSLEPCPPRWK | | |
| | VMSLGPCSASCGLGTA | | |
| | RRSVACVQLDQGQDVE | | |
| | VDEAACAALVRPEASV | | |
| | PCLIADCTYRWHVGTW | | |
| | MECSVSCGDGIQRRRD | | |
| | TCLGPQAQAPVPADFC | | |
| | QHLPKPVTVRGCWAGP | | |
| | CVGQGTPSLVPHEEAA | | |
| | APGRTTATPAGASLEW | | |
| | SQARGLLFSPAPQPRRL | | |
| | LPGPQENSVQSSACGR | | |
| | QHLEPTGTIDMRGPGQ | | |
| | ADCAVAIGRPLGEVVT | | |
| | LRVLESSLNCSAGDML | | |
| | LLWGRLTWRKMCRKL | | |
| | LDMTFSSKTNTLVVRQ | | |
| | RCGRPGGGVLLRYGSQ | | |
| | LAPETFYRECDMQLFG | | |
| | PWGEIVSPSLSPATSNA | | |
| | GGCRLFINVAPHARIAI | | |
| | HALATNMGAGTEGAN | | |
| | ASYILIRDTHSLRTTAFH | | |
| | GQQVLYWESESSQAEM | | |
| | EFSEGFLKAQASLRGQ | | |
| | YWTLQSWVPEMQDPQ | | |
| | SWKGKEGT | | |
| FOXP3 | MPNPRPGKPSAPSLALG PSPGASPSWRAAPKAS DLLGARGPGGTFQGRD LRGGAHASSSSLNPMPP SQLQLPTLPLVMVAPSG ARLGPLPHLQALLQDR PHFMHQLSTVDAHART PVLQVHPLESPAMISLT PPTTATGVFSLKARPGL PPGINVASLEWVSREPA | Immune cells | [chemical structure] |
| | LLCTFPNPSAPRKDSTL | | (50 mol %) |
| | SAVPQSSYPLLANGVC | | DSPC (10 mol %) |
| | KWPGCEKVFEEPEDFL | | Beta-sitosterol (28.5% mol %) |
| | KHCQADHLLDEKGRA | | Cholesterol (10 mol %) |
| | QCLLQREMVQSLEQQL | | PEG DMG (1.5 mol %) |
| | VLEKEKLSAMQAHLAG | | |
| | KMALTKASSVASSDKG | | |
| | SCCIVAAGSQGPVVPA | | |
| | WSGPREAPDSLFAVRR | | |
| | HLWGSHGNSTFPEFLH | | |
| | NMDYFKFHNMRPPFTY | | |
| | ATLIRWAILEAPEKQRT | | |
| | LNEIYHWFTRMFAFFR | | |
| | NHPATWKNAIRHNLSL | | |
| | HKCFVRVESEKGAVWT | | |
| | VDELEFRKKRSQRPSRC | | |
| | SNPTPGP | | |
| IL-10 | SPGQGTQSENSCTHFPG NLPNMLRDLRDAFSRV KTFFQMKDQLDNLLLK ESLLEDFKGYLGCQALS EMIQFYLEEVMPQAEN QDPDIKAHVNSLGENL KTLRLRLRRCHRFLPCE NKSKAVEQVKNAFNKL QEKGIYKAMSEFDIFIN YIEAYMTMKIRN | Immune cells | [chemical structure] |
| | | | (50 mol %) |
| | | | DSPC (10 mol %) |
| | | | Beta-sitosterol (28.5% mol %) |
| | | | Cholesterol (10 mol %) |
| | | | PEG DMG (1.5 mol %) |
| IL-2 | APTSSSTKKTQLQLEHL LLDLQMILNGINNYKNP KLTRMLTFKFYMPKKA TELKHLQCLEEELKPLE EVLNLAQSKNFHLRPR DLISNINVIVLELKGSET TFMCEY ADETATIVEFL NRWITFCQSIISTLT | Immune cells | [chemical structure] |
| | | | (50 mol %) |
| | | | DSPC (10 mol %) |
| | | | Beta-sitosterol (28.5% mol %) |
| | | | Cholesterol (10 mol %) |
| | | | PEG DMG (1.5 mol %) |

[0313] In some embodiments, the at least one of the expression sequences encodes a therapeutic protein. In some embodiments, the first or second expression sequence encodes a cytokine, e.g., IL-12p70, IL-15, IL-2, IL-18, IL-21, IFN-α, IFN-β, IL-10, TGF-beta, IL-4, or IL-35, or a functional fragment thereof. In some embodiments, the first or second expression sequence encodes an immune checkpoint inhibitor. In some embodiments, the first or second expression sequence encodes an agonist (e.g., a TNFR family member such as CD137L, OX40L, ICOSL, LIGHT, or CD70). In some embodiments, the first or second expression sequence encodes a chimeric antigen receptor. In some embodiments, the first or second expression sequence encodes an inhibitory receptor agonist (e.g., PDL1, PDL2, Galectin-9, VISTA, B7H4, or MHCII) or inhibitory receptor (e.g., PD1, CTLA4, TIGIT, LAG3, or TIM3). In some embodiments, the first or second expression sequence encodes an inhibitory receptor antagonist. In some embodiments, the first or second expression sequence encodes one or more TCR chains (alpha and beta chains or gamma and delta chains). In some embodiments, the first or second expression sequence encodes a secreted T cell or immune cell engager (e.g., a bispecific antibody such as BiTE, targeting, e.g., CD3, CD137, or CD28 and a tumor-expressed protein e.g., CD19, CD20, or BCMA etc.). In some embodiments, the first or second expression sequence encodes a transcription factor (e.g., FOXP3, HELIOS, TOX1, or TOX2). In some embodiments, the first or second expression sequence encodes an immunosuppressive enzyme (e.g., IDO or CD39/CD73). In some embodiments, the first or second expression sequence encodes a GvHD (e.g., anti-HLA-A2 CAR-Tregs).

[0314] In some embodiments, the first and second expression sequences encode the alpha and beta chains of a T cell receptor (TCR). In some embodiments, the first and second expression sequences encode the gamma and delta chains of a TCR. The invention includes methods of treating a subject suffering from cancer comprising administering a therapeutically effective amount of a composition comprising a circular RNA polynucleotide encoding a TCR alpha chain and a TCR beta chain or a TCR gamma chain and a TCR delta chain.

[0315] In some embodiments, the first and second expression sequences encode a chimeric antigen receptor (CAR) and an antagonist of PD1 or PDL1. In some embodiments, the first and second expression sequences encode a chimeric antigen receptor (CAR) and a cytokine. In some embodiments, the cytokine is IL-12p70, IL-15, IL-2, IL-18, IL-21, IFN-α, IFN-β, IL-10, TGF-beta, IL-4, or IL-35, or a functional fragment thereof. The invention includes methods of treating a subject suffering from cancer comprising administering a therapeutically effective amount of a composition comprising a circular RNA polynucleotide encoding a CAR and an antagonist of PD1 or PDL1. The invention includes methods of treating a subject suffering from cancer comprising administering a therapeutically effective amount of a composition comprising a circular RNA polynucleotide encoding a CAR and a cytokine.

[0316] In some embodiments, the first and second expression sequences encode a transcription factor and a cytokine. In some embodiments, the transcription factor is FOXP3, STAT5B, or HELIOS and the cytokine is IL10, IL12, or TGF beta. The invention includes methods of treating a subject suffering from an autoimmune disorder comprising administering a therapeutically effective amount of a composition comprising a circular RNA polynucleotide encoding a transcription factor, e.g., FOXP3, and a cytokine.

[0317] In some embodiments, the first and second expression sequences encode a transcription factor and a CAR. In some embodiments, the transcription factor is FOXP3, STAT5B, or HELIOS. The invention includes methods of treating a subject suffering from an autoimmune disorder comprising administering a therapeutically effective amount of a composition comprising a circular RNA polynucleotide encoding a transcription factor, e.g., FOXP3, and a CAR.

[0318] In some embodiments, the first and second expression sequences encode a cytokine and an antigen. In some embodiments, the cytokine is IFNγ. In some embodiments, the antigen is a neoantigen. The invention includes methods of treating a subject suffering from cancer comprising administering a therapeutically effective amount of a composition comprising a circular RNA polynucleotide encoding a cytokine, e.g., IFNγ, and a tumor antigen or fragment thereof.

[0319] In some embodiments, the first expression sequence encodes a first chimeric antigen receptor (CAR) and the second expression sequence encodes a second CAR. In some embodiments, the first CAR is specific for a first antigen and contains a costimulatory domain and an intracellular signaling domain, and the second CAR is specific for a second antigen and contains a costimulatory domain and a intracellular signaling domain. In some embodiments, expressing CARs targeting multiple tumor antigens provides a more effective therapy against a tumor with heterogeneous antigen expression. The invention includes methods of treating a subject suffering from cancer comprising administering a therapeutically effective amount of a composition comprising a circular RNA polynucleotide encoding a first CAR and a second CAR.

[0320] In some embodiments, the first expression sequence encodes a first cytokine and the second expression sequence encodes a second cytokine. In some embodiments, the first and second cytokines are in the group IL-10, TGFβ, and IL-35. In some embodiments, the first and second cytokines are in the group IFNγ, IL-2, IL-7, IL-15, and IL-18.

[0321] In some embodiments, a polynucleotide encodes a protein that is made up of subunits that are encoded by more than one gene. For example, the protein may be a heterodimer, wherein each chain or subunit of the protein is encoded by a separate gene. It is possible that more than one circRNA molecule is delivered in the transfer vehicle and each circRNA encodes a separate subunit of the protein. Alternatively, a single circRNA may be engineered to encode more than one subunit. In certain embodiments, separate circRNA molecules encoding the individual subunits may be administered in separate transfer vehicles.

### 3.1 Cytokines

[0322] Descriptions and/or amino acid sequences of IL-2, IL-7, IL-10, IL-12, IL-15, IL-18, IL-270, IFNγ, and/or TGFβ1 are provided herein and at the www.uniprot.org database at accession numbers: P60568 (IL-2), P29459 (IL-12A), P29460 (IL-12B), P13232 (IL-7), P22301 (IL-10), P40933 (IL-15), Q14116 (IL-18), Q14213 (IL-270), P01579 (IFNγ), and/or P01137 (TGFβ1).

### 3.2 PD-1 and PD-L1 Antagonists

[0323] In some embodiments, a PD-1 inhibitor is pembrolizumab, pidilizumab, or nivolumab. In some embodiments, Nivolumab is described in International Patent Publication No. WO2006/121168. In some embodiments, Pembrolizumab is described in WO2009/114335. In some embodiments, Pidilizumab is described in International Patent Publication No. WO2009/101611. Additional anti-PD1 antibodies are described in U.S. Pat. No. 8,609,089, U.S. Patent Publication Nos. US 2010028330 and US 20120114649, and International Patent Publication Nos. WO2010/027827 and WO2011/066342.

[0324] In some embodiments, a PD-L1 inhibitor is atezolizumab, avelumab, durvalumab, BMS-936559, or CK-301.

[0325] Descriptions and/or amino acid sequences of heavy and light chains of PD-1, and/or PD-L1 antibodies are provided herein and at the www.drugbank.ca database at accession numbers: DB09037 (Pembrolizumab), DB09035 (Nivolumab), DB15383 (Pidilizumab), DB11595 (Atezolizumab), DB 11945 (Avelumab), and DB11714 (Durvalumab).

### 3.3 Chimeric Antigen Receptors

[0326] Chimeric antigen receptors (CARs or CAR-Ts) are genetically-engineered receptors. These engineered receptors may be inserted into and expressed by immune cells, including T cells via circular RNA as described herein. With a CAR, a single receptor may be programmed to both recognize a specific antigen and, when bound to that antigen, activate the immune cell to attack and destroy the cell bearing that antigen. When these antigens exist on tumor cells, an immune cell that expresses the CAR may target and kill the tumor cell. In some embodiments, the CAR encoded by the polynucleotide comprises (i) an antigen-binding molecule that specifically binds to a target antigen, (ii) a hinge domain, a transmembrane domain, and an intracellular domain, and (iii) an activating domain.

[0327] In some embodiments, an orientation of the CARs in accordance with the disclosure comprises an antigen binding domain (such as scFv) in tandem with a costimulatory domain and an activating domain. The costimulatory domain may comprise one or more of an extracellular portion, a transmembrane portion, and an intracellular portion. In other embodiments, multiple costimulatory domains may be utilized in tandem.

### Antigen Binding Domain

[0328] CARs may be engineered to bind to an antigen (such as a cell-surface antigen) by incorporating an antigen binding molecule that interacts with that targeted antigen. In some embodiments, the antigen binding molecule is an antibody fragment thereof, e.g., one or more single chain antibody fragment (scFv). An scFv is a single chain antibody fragment having the variable regions of the heavy and light chains of an antibody linked together. See, for example, U.S. Pat. Nos. 7,741,465, and 6,319,494 as well as Eshhar et al., Cancer Immunol Immunotherapy (1997) 45: 131-136. An scFv retains the parent antibody's ability to specifically interact with target antigen. scFvs are useful in chimeric antigen receptors because they may be engineered to be expressed as part of a single chain along with the other CAR components. Id. See also Krause et al., J. Exp. Med., Volume 188, No. 4, 1998 (619-626); Finney et al., Journal of Immunology, 1998, 161: 2791-2797. It will be appreciated that the antigen binding molecule is typically contained within the extracellular portion of the CAR such that it is capable of recognizing and binding to the antigen of interest. Bispecific and multispecific CARs are contemplated within the scope of the invention, with specificity to more than one target of interest.

[0329] In some embodiments, the antigen binding molecule comprises a single chain, wherein the heavy chain variable region and the light chain variable region are connected by a linker. In some embodiments, the VH is located at the N terminus of the linker and the VL is located at the C terminus of the linker. In other embodiments, the VL is located at the N terminus of the linker and the VH is located at the C terminus of the linker. In some embodiments, the linker comprises at least about 5, at least about 8, at least about 10, at least about 13, at least about 15, at least about 18, at least about 20, at least about 25, at least about 30, at least about 35, at least about 40, at least about 45, at least about 50, at least about 60, at least about 70, at least about 80, at least about 90, or at least about 100 amino acids.

[0330] In some embodiments, the antigen binding molecule comprises a nanobody. In some embodiments, the antigen binding molecule comprises a DARPin. In some embodiments, the antigen binding molecule comprises an anticalin or other synthetic protein capable of specific binding to target protein.

[0331] In some embodiments, the CAR comprises an antigen binding domain specific for an antigen selected from the group CD19, CD123, CD22, CD30, CD171, CS-1, C-type lectin-like molecule-1, CD33, epidermal growth factor receptor variant III (EGFRvIII), ganglioside G2 (GD2), ganglioside GD3, TNF receptor family member B cell maturation (BCMA), Tn antigen ((Tn Ag) or (GaINAca-Ser/Thr)), prostate-specific membrane antigen (PSMA), Receptor tyrosine kinase-like orphan receptor 1 (ROR1), Fms-Like Tyrosine Kinase 3 (FLT3), Tumor-associated glycoprotein 72 (TAG72), CD38, CD44v6, Carcinoembryonic antigen (CEA), Epithelial cell adhesion molecule (EPCAM), B7H3 (CD276), KIT (CD117), Interleukin-13 receptor subunit alpha-2, mesothelin, Interleukin 11 receptor alpha (IL-11Ra), prostate stem cell antigen (PSCA), Protease Serine 21, vascular endothelial growth factor receptor 2 (VEGFR2), Lewis(Y) antigen, CD24, Platelet-derived growth factor receptor beta (PDGFR-beta), Stage-specific embryonic antigen-4 (SSEA-4), CD20, Folate receptor alpha, HER2, HER3, Mucin 1, cell surface associated (MUC1), epidermal growth factor receptor (EGFR), neural cell adhesion molecule (NCAM), Prostase, prostatic acid phosphatase (PAP), elongation factor 2 mutated (ELF2M), Ephrin B2, fibroblast activation protein alpha (FAP), insulin-like growth factor 1 receptor (IGF-I receptor), carbonic anhydrase IX (CAIX), Proteasome (Prosome, Macropain) Subunit, Beta Type, 9 (LMP2), glycoprotein 100 (gp100), oncogene fusion protein consisting of breakpoint cluster region (BCR) and Abelson murine leukemia viral oncogene homolog 1 (Abl) (bcr-abl), tyrosinase, ephrin type-A receptor 2 (EphA2), Fucosyl GM1, sialyl Lewis adhesion molecule (sLe), ganglioside GM3, transglutaminase 5 (TGS5), high molecular weight-melanoma-associated antigen (HMWMAA), o-acetyl-GD2 ganglioside (OAcGD2), Folate receptor beta, tumor endothelial marker 1 (TEM1/CD248), tumor endothelial marker 7-related (TEM7R), claudin 6 (CLDN6), thyroid stimulating hormone receptor (TSHR), G protein-coupled receptor class C group 5, member D (GPRC5D), chromosome X open reading frame 61 (CXORF61), CD97, CD179a, anaplastic lymphoma kinase (ALK), Polysialic acid, placenta-specific 1 (PLAC1), hexasaccharide portion of globoH glycoceramide (GloboH), mammary gland differentiation antigen (NY-BR-1), uroplakin 2 (UPK2), Hepatitis A virus cellular receptor 1 (HAVCR1), adrenoceptor beta 3 (ADRB3), pannexin 3 (PANX3), G protein-coupled receptor 20 (GPR20), lymphocyte antigen 6 complex, locus K 9 (LY6K), Olfactory receptor 51E2 (OR51E2), TCR Gamma Alternate Reading Frame Protein (TARP), Wilms tumor protein (WTi), Cancer/testis antigen 1 (NY-ESO-1), Cancer/testis antigen 2 (LAGE-1a), MAGE family members (including MAGE-A1, MAGE-A3 and MAGE-A4), ETS translocation-variant gene 6, located on chromosome 12p (ETV6-AML), sperm protein 17 (SPA17), X Antigen Family, Member 1A (XAGE1), angiopoietin-binding cell surface receptor 2 (Tie 2), melanoma cancer testis antigen-1 (MAD-CT-1), melanoma cancer testis antigen-2 (MAD-CT-2), Fos-related antigen 1, tumor protein p53 (p53), p53 mutant, prostein, surviving, telomerase, prostate carcinoma tumor antigen-1, melanoma antigen recognized by T cells 1, Rat sarcoma (Ras) mutant, human Telomerase reverse transcriptase (hTERT), sarcoma translocation breakpoints, melanoma inhibitor of apoptosis (ML-IAP), ERG (transmembrane protease, serine 2 (TMPRSS2) ETS fusion gene), N-Acetyl glucosaminyl-transferase V (NA17), paired box protein Pax-3 (PAX3), Androgen receptor, Cyclin B1, v-myc avian myelocytomatosis viral oncogene neuroblastoma derived homolog (MYCN), Ras Homolog Family Member C (RhoC), Tyrosinase-related protein 2 (TRP-2), Cytochrome P450 1B1 (CYPIB1), CCCTC-Binding Factor (Zinc Finger Protein)-Like, Squamous Cell Carcinoma Antigen Recognized By T Cells 3 (SART3), Paired box protein Pax-5 (PAX5), proacrosin binding protein sp32 (OY-TES1), lymphocyte-specific protein tyrosine kinase (LCK), A kinase anchor protein 4 (AKAP-4), synovial sarcoma, X breakpoint 2 (SSX2), Receptor for Advanced Glycation Endproducts (RAGE-1), renal ubiquitous 1 (RU1), renal ubiquitous 2 (RU2), legumain, human papilloma virus E6 (HPV E6), human papilloma virus E7 (HPV E7), intestinal carboxyl esterase, heat shock protein 70-2 mutated (mut hsp70-2), CD79a, CD79b, CD72, Leukocyte-associated immunoglobulin-like receptor 1 (LAIR1), Fc fragment of IgA receptor (FCAR or CD89), Leukocyte immunoglobulin-like receptor subfamily A member 2 (LILRA2), CD300 molecule-like family member f (CD300LF), C-type lectin domain family 12 member A (CLEC12A), bone marrow stromal cell antigen 2 (BST2), EGF-like module-containing mucin-like hormone receptor-like 2 (EMR2), lymphocyte antigen 75 (LY75), Glypican-3 (GPC3), Fc receptor-like 5 (FCRL5), MUC16, 5T4, 8H9, αvβθ integrin, αvβ6 integrin, alphafetoprotein (AFP), B7-H6, ca-125, CA9, CD44, CD44v7/8, CD52, E-cadherin, EMA (epithelial membrane antigen), epithelial glycoprotein-2 (EGP-2), epithelial glycoprotein-40 (EGP-40), ErbB4, epithelial tumor antigen (ETA), folate binding protein (FBP), kinase insert domain receptor (KDR), k-light chain, L1 cell adhesion molecule, MUC18, NKG2D, oncofetal antigen (h5T4), tumor/testis-antigen 1B, GAGE, GAGE-1, BAGE, SCP-1, CTZ9, SAGE, CAGE, CT10, MART-1, immunoglobulin lambda-like polypeptide 1 (IGLL1), Hepatitis B Surface Antigen Binding Protein (HBsAg), viral capsid antigen (VCA), early antigen (EA), EBV nuclear antigen (EBNA), HHV-6 p41 early antigen, HHV-6B U94 latent antigen, HHV-6B p98 late antigen, cytomegalovirus (CMV) antigen, large T antigen, small T antigen, adenovirus antigen, respiratory syncytial virus (RSV) antigen, haemagglutinin (HA), neuraminidase (NA), parainfluenza type 1 antigen, parainfluenza type 2 antigen, parainfluenza type 3 antigen, parainfluenza type 4 antigen, Human Metapneumovirus (HMPV) antigen, hepatitis C virus (HCV) core antigen, HIV p24 antigen, human T-cell lympotrophic virus (HTLV-1) antigen, Merkel cell polyoma virus small T antigen, Merkel cell polyoma virus large T antigen, Kaposi sarcoma-associated herpesvirus (KSHV) lytic nuclear antigen and KSHV latent nuclear antigen. In some embodiments, an antigen binding domain comprises SEQ ID NO: 321 and/or 322.

### Hinge/Spacer Domain

[0332] In some embodiments, a CAR of the instant disclosure comprises a hinge or spacer domain. In some embodiments, the hinge/spacer domain may comprise a truncated hinge/spacer domain (THD) the THD domain is a truncated version of a complete hinge/spacer domain (“CHD”). In some embodiments, an extracellular domain is from or derived from (e.g., comprises all or a fragment of) ErbB2, glycophorin A (GpA), CD2, CD3 delta, CD3 epsilon, CD3 gamma, CD4, CD7, CD8a, CD8[T CD11a (IT GAL), CD11b (IT GAM), CD11c (ITGAX), CD11d (IT GAD), CD18 (ITGB2), CD19 (B4), CD27 (TNFRSF7), CD28, CD28T, CD29 (ITGB1), CD30 (TNFRSF8), CD40 (TNFRSF5), CD48 (SLAMF2), CD49a (ITGA1), CD49d (ITGA4), CD49f (ITGA6), CD66a (CEACAMI), CD66b (CEACAM8), CD66c (CEACAM6), CD66d (CEACAM3), CD66e (CEACAM5), CD69 (CLEC2), CD79A (B-cell antigen receptor complex-associated alpha chain), CD79B (B-cell antigen receptor complex-associated beta chain), CD84 (SLAMF5), CD96 (Tactile), CD100 (SEMA4D), CD103 (ITGAE), CD134 (0X40), CD137 (4-1BB), CD150 (SLAMF1), CD158A (KIR2DL1), CD158B1 (KIR2DL2), CD158B2 (KIR2DL3), CD158C (KIR3DP1), CD158D (KIRDL4), CD158F1 (KIR2DL5A), CD158F2 (KIR2DL5B), CD158K (KIR3DL2), CD160 (BY55), CD162 (SELPLG), CD226 (DNAM1), CD229 (SLAMF3), CD244 (SLAMF4), CD247 (CD3-zeta), CD258 (LIGHT), CD268 (BAFFR), CD270 (TNFSF14), CD272 (BTLA), CD276 (B7-H3), CD279 (PD-1), CD314 (NKG2D), CD319 (SLAMF7), CD335 (NK-p46), CD336 (NK-p44), CD337 (NK-p30), CD352 (SLAMF6), CD353 (SLAMF8), CD355 (CRT AM), CD357 (TNFRSF18), inducible T cell co-stimulator (ICOS), LFA-1 (CD11a/CD18), NKG2C, DAP-10, ICAM-1, NKp80 (KLRF1), IL-2R beta, IL-2R gamma, IL-7R alpha, LFA-1, SLAMF9, LAT, GADS (GrpL), SLP-76 (LCP2), PAG1/CBP, a CD83 ligand, Fc gamma receptor, MHC class 1 molecule, MHC class 2 molecule, a TNF receptor protein, an immunoglobulin protein, a cytokine receptor, an integrin, activating NK cell receptors, a Toll ligand receptor, and fragments or combinations thereof. A hinge or spacer domain may be derived either from a natural or from a synthetic source.

[0333] In some embodiments, a hinge or spacer domain is positioned between an antigen binding molecule (e.g., an scFv) and a transmembrane domain. In this orientation, the hinge/spacer domain provides distance between the antigen binding molecule and the surface of a cell membrane on which the CAR is expressed. In some embodiments, a hinge or spacer domain is from or derived from an immunoglobulin. In some embodiments, a hinge or spacer domain is selected from the hinge/spacer regions of IgG1, IgG2, IgG3, IgG4, IgA, IgD, IgE, and IgM, or a fragment thereof. In some embodiments, a hinge or spacer domain comprises, is from, or is derived from the hinge/spacer region of CD8 alpha. In some embodiments, a hinge or spacer domain comprises, is from, or is derived from the hinge/spacer region of CD28. In some embodiments, a hinge or spacer domain comprises a fragment of the hinge/spacer region of CD8 alpha or a fragment of the hinge/spacer region of CD28, wherein the fragment is anything less than the whole hinge/spacer region. In some embodiments, the fragment of the CD8 alpha hinge/spacer region or the fragment of the CD28 hinge/spacer region comprises an amino acid sequence that excludes at least 1, at least 2, at least 3, at least 4, at least 5, at least 6, at least 7, at least 8, at least 9, at least 10, at least 11, at least 12, at least 13, at least 14, at least 15, at least 16, at least 17, at least 18, at least 19, or at least 20 amino acids at the N-terminus or C-Terminus, or both, of the CD8 alpha hinge/spacer region, or of the CD28 hinge/spacer region.

### Transmembrane Domain

[0334] The CAR of the present disclosure may further comprise a transmembrane domain and/or an intracellular signaling domain. The transmembrane domain may be designed to be fused to the extracellular domain of the CAR. It may similarly be fused to the intracellular domain of the CAR. In some embodiments, the transmembrane domain that naturally is associated with one of the domains in a CAR is used. In some instances, the transmembrane domain may be selected or modified (e.g., by an amino acid substitution) to avoid binding of such domains to the transmembrane domains of the same or different surface membrane proteins to minimize interactions with other members of the receptor complex. The transmembrane domain may be derived either from a natural or from a synthetic source. Where the source is natural, the domain may be derived from any membrane-bound or transmembrane protein.

[0335] Transmembrane regions may be derived from (i.e. comprise) a receptor tyrosine kinase (e.g., ErbB2), glycophorin A (GpA), 4-1BB/CD137, activating NK cell receptors, an Immunoglobulin protein, B7-H3, BAFFR, BFAME (SEAMF8), BTEA, CD100 (SEMA4D), CD103, CD160 (BY55), CD 18, CD 19, CD 19a, CD2, CD247, CD27, CD276 (B7-H3), CD28, CD29, CD3 delta, CD3 epsilon, CD3 gamma, CD30, CD4, CD40, CD49a, CD49D, CD49f, CD69, CD7, CD84, CD8alpha, CD8beta, CD96 (Tactile), CD11a, CD11b, CD11c, CD11d, CDS, CEACAMI, CRT AM, cytokine receptor, DAP-10, DNAM1 (CD226), Fc gamma receptor, GADS, GITR, HVEM (EIGHTR), IA4, ICAM-1, ICAM-1, Ig alpha (CD79a), IE-2R beta, IE-2R gamma, IE-7R alpha, inducible T cell costimulator (ICOS), integrins, ITGA4, ITGA4, ITGA6, IT GAD, ITGAE, ITGAE, IT GAM, ITGAX, ITGB2, ITGB7, ITGB1, KIRDS2, EAT, LFA-1, LFA-1, a ligand that specifically binds with CD83, LIGHT, LIGHT, LTBR, Ly9 (CD229), lymphocyte function-associated antigen-1 (LFA-1; CD1-1a/CD18), MHC class 1 molecule, NKG2C, NKG2D, NKp30, NKp44, NKp46, NKp80 (KLRF1), OX-40, PAG/Cbp, programmed death-1 (PD-1), PSGL1, SELPLG (CD162), Signaling Lymphocytic Activation Molecules (SLAM proteins), SLAM (SLAMF1; CD150; IPO-3), SLAMF4 (CD244; 2B4), SLAMF6 (NTB-A; Lyl08), SLAMF7, SLP-76, TNF receptor proteins, TNFR2, TNFSF14, a Toll ligand receptor, TRANCE/RANKL, VLA1, or VLA-6, or a fragment, truncation, or a combination thereof.

[0336] In some embodiments, suitable intracellular signaling domain include, but are not limited to, activating Macrophage/Myeloid cell receptors CSFR1, MYD88, CD14, TIE2, TLR4, CR3, CD64, TREM2, DAP10, DAP12, CD169, DECTIN1, CD206, CD47, CD163, CD36, MARCO, TIM4, MERTK, F4/80, CD91, C1QR, LOX-1, CD68, SRA, BAI-1, ABCA7, CD36, CD31, Lactoferrin, or a fragment, truncation, or combination thereof.

[0337] In some embodiments, a receptor tyrosine kinase may be derived from (e.g., comprise) Insulin receptor (InsR), Insulin-like growth factor I receptor (IGF1R), Insulin receptor-related receptor (IRR), platelet derived growth factor receptor alpha (PDGFRa), platelet derived growth factor receptor beta (PDGFRfi). KIT proto-oncogene receptor tyrosine kinase (Kit), colony stimulating factor 1 receptor (CSFR), fms related tyrosine kinase 3 (FLT3), fins related tyrosine kinase 1 (VEGFR-1), kinase insert domain receptor (VEGFR-2), fms related tyrosine kinase 4 (VEGFR-3), fibroblast growth factor receptor 1 (FGFR1), fibroblast growth factor receptor 2 (FGFR2), fibroblast growth factor receptor 3 (FGFR3), fibroblast growth factor receptor 4 (FGFR4), protein tyrosine kinase 7 (CCK4), neurotrophic receptor tyrosine kinase 1 (trkA), neurotrophic receptor tyrosine kinase 2 (trkB), neurotrophic receptor tyrosine kinase 3 (trkC), receptor tyrosine kinase like orphan receptor 1 (ROR1), receptor tyrosine kinase like orphan receptor 2 (ROR2), muscle associated receptor tyrosine kinase (MuSK), MET proto-oncogene, receptor tyrosine kinase (MET), macrophage stimulating 1 receptor (Ron), AXL receptor tyrosine kinase (Axl), TYR03 protein tyrosine kinase (Tyro3), MER proto-oncogene, tyrosine kinase (Mer), tyrosine kinase with immunoglobulin like and EGF like domains 1 (TIE1), TEK receptor tyrosine kinase (TIE2), EPH receptor A1 (EphA1), EPH receptor A2 (EphA2), (EPH receptor A3) EphA3, EPH receptor A4 (EphA4), EPH receptor A5 (EphA5), EPH receptor A6 (EphA6), EPH receptor A7 (EphA7), EPH receptor A8 (EphA8), EPH receptor A10 (EphAlO), EPH receptor B1 (EphB1), EPH receptor B2 (EphB2), EPH receptor B3 (EphB3), EPH receptor B4 (EphB4), EPH receptor B6 (EphB6), ret proto oncogene (Ret), receptor-like tyrosine kinase (RYK), discoidin domain receptor tyrosine kinase 1 (DDR1), discoidin domain receptor tyrosine kinase 2 (DDR2), c-ros oncogene 1, receptor tyrosine kinase (ROS), apoptosis associated tyrosine kinase (Lmr1), lemur tyrosine kinase 2 (Lmr2), lemur tyrosine kinase 3 (Lmr3), leukocyte receptor tyrosine kinase (LTK), ALK receptor tyrosine kinase (ALK), or serine/threonine/tyrosine kinase 1 (STYK1).

### Costimulatory Domain

[0338] In certain embodiments, the CAR comprises a costimulatory domain. In some embodiments, the costimulatory domain comprises 4-1BB (CD137), CD28, or both, and/or an intracellular T cell signaling domain. In a preferred embodiment, the costimulatory domain is human CD28, human 4-1BB, or both, and the intracellular T cell signaling domain is human CD3 zeta (ζ). The 4-1BB, CD28, CD3 zeta, or any of these may comprise less than the whole 4-1BB, CD28 or CD3 zeta, respectively. Chimeric antigen receptors may incorporate costimulatory (signaling) domains to increase their potency. See U.S. Pat. Nos. 7,741,465, and 6,319,494, as well as Krause et al. and Finney et al. (supra), Song et al., Blood 119:696-706 (2012); Kalos et al., Sci Transl. Med. 3:95 (2011); Porter et al., N. Engl. J. Med. 365:725-33 (2011), and Gross et al., Amur. Rev. Pharmacol. Toxicol. 56:59-83 (2016).

[0339] In some embodiments, a costimulatory domain comprises the amino acid sequence of SEQ ID NO: 318 or 320.

### Intracellular Signaling Domain

[0340] The intracellular (signaling) domain of the engineered T cells disclosed herein may provide signaling to an activating domain, which then activates at least one of the normal effector functions of the immune cell. Effector function of a T cell, for example, may be cytolytic activity or helper activity including the secretion of cytokines.

[0341] In some embodiments, suitable intracellular signaling domain include (e.g., comprise), but are not limited to 4-1BB/CD137, activating NK cell receptors, an immunoglobulin protein, B7-H3, BAFFR, BLAME (SLAMF8), BTLA, CD100 (SEMA4D), CD103, CD160 (BY55), CD18, CD19, CD 19a, CD2, CD247, CD27, CD276 (B7-H3), CD28, CD29, CD3 delta, CD3 epsilon, CD3 gamma, CD30, CD4, CD40, CD49a, CD49D, CD49f, CD69, CD7, CD84, CD8alpha, CD8beta, CD96 (Tactile), CD11a, CD11b, CD11c, CD11d, CDS, CEACAMI, CRT AM, cytokine receptor, DAP-10, DNAM1 (CD226), Fc gamma receptor, GADS, GITR, HVEM (LIGHTR), IA4, ICAM-1, ICAM-1, Ig alpha (CD79a), IL-2R beta, IL-2R gamma, IL-7R alpha, inducible T cell costimulator (ICOS), integrins, ITGA4, ITGA4, ITGA6, IT GAD, ITGAE, ITGAL, IT GAM, ITGAX, ITGB2, ITGB7, ITGB1, KIRDS2, LAT, LFA-1, LFA-1, ligand that specifically binds with CD83, LIGHT, LIGHT, LTBR, Ly9 (CD229), Lyl08), lymphocyte function-associated antigen-1 (LFA-1; CD1-1a/CD18), MHC class 1 molecule, NKG2C, NKG2D, NKp30, NKp44, NKp46, NKp80 (KLRF1), OX-40, PAG/Cbp, programmed death-1 (PD-1), PSGL1, SELPLG (CD162), Signaling Lymphocytic Activation Molecules (SLAM proteins), SLAM (SLAMF1; CD150; IPO-3), SLAMF4 (CD244; 2B4), SLAMF6 (NTB-A, SLAMF7, SLP-76, TNF receptor proteins, TNFR2, TNFSF14, a Toll ligand receptor, TRANCE/RANKL, VLA1, or VLA-6, or a fragment, truncation, or a combination thereof.

[0342] CD3 is an element of the T cell receptor on native T cells, and has been shown to be an important intracellular activating element in CARs. In some embodiments, the CD3 is CD3 zeta. In some embodiments, the activating domain comprises an amino acid sequence at least about 60%, at least about 65%, at least about 70%, at least about 75%, at least about 80%, at least about 85%, at least about 90%, at least about 95%, at least about 96%, at least about 97%, at least about 98%, at least about 99%, or about 100% identical to the polypeptide sequence of SEQ ID NO: 319.

### 3.4 T Cell Receptors

[0343] TCRs are described using the International Immunogenetics (IMGT) TCR nomenclature, and links to the IMGT public database of TCR sequences. Native alpha-beta heterodimeric TCRs have an alpha chain and a beta chain. Broadly, each chain may comprise variable, joining and constant regions, and the beta chain also usually contains a short diversity region between the variable and joining regions, but this diversity region is often considered as part of the joining region. Each variable region may comprise three CDRs (Complementarity Determining Regions) embedded in a framework sequence, one being the hypervariable region named CDR3. There are several types of alpha chain variable (Vα) regions and several types of beta chain variable (Vβ) regions distinguished by their framework, CDR1 and CDR2 sequences, and by a partly defined CDR3 sequence. The Vα types are referred to in IMGT nomenclature by a unique TRAV number. Thus “TRAV21” defines a TCR Vα region having unique framework and CDR1 and CDR2 sequences, and a CDR3 sequence which is partly defined by an amino acid sequence which is preserved from TCR to TCR but which also includes an amino acid sequence which varies from TCR to TCR. In the same way, “TRBV5-1” defines a TCR Vβ region having unique framework and CDR1 and CDR2 sequences, but with only a partly defined CDR3 sequence.

[0344] The joining regions of the TCR are similarly defined by the unique IMGT TRAJ and TRBJ nomenclature, and the constant regions by the IMGT TRAC and TRBC nomenclature.

[0345] The beta chain diversity region is referred to in IMGT nomenclature by the abbreviation TRBD, and, as mentioned, the concatenated TRBD/TRBJ regions are often considered together as the joining region.

[0346] The unique sequences defined by the IMGT nomenclature are widely known and accessible to those working in the TCR field. For example, they can be found in the IMGT public database. The “T cell Receptor Factsbook”, (2001) LeFranc and LeFranc, Academic Press, ISBN 0-12-441352-8 also discloses sequences defined by the IMGT nomenclature, but because of its publication date and consequent time-lag, the information therein sometimes needs to be confirmed by reference to the IMGT database.

[0347] Native TCRs exist in heterodimeric αβ or γδ forms. However, recombinant TCRs consisting of ac or RR homodimers have previously been shown to bind to peptide MHC molecules. Therefore, the TCR of the invention may be a heterodimeric αβ TCR or may be an ac or RR homodimeric TCR.

[0348] For use in adoptive therapy, an αβ heterodimeric TCR may, for example, be transfected as full length chains having both cytoplasmic and transmembrane domains. In certain embodiments TCRs of the invention may have an introduced disulfide bond between residues of the respective constant domains, as described, for example, in WO 2006/000830.

[0349] TCRs of the invention, particularly alpha-beta heterodimeric TCRs, may comprise an alpha chain TRAC constant domain sequence and/or a beta chain TRBC1 or TRBC2 constant domain sequence. The alpha and beta chain constant domain sequences may be modified by truncation or substitution to delete the native disulfide bond between Cys4 of exon 2 of TRAC and Cys2 of exon 2 of TRBC1 or TRBC2. The alpha and/or beta chain constant domain sequence(s) may also be modified by substitution of cysteine residues for Thr 48 of TRAC and Ser 57 of TRBC1 or TRBC2, the said cysteines forming a disulfide bond between the alpha and beta constant domains of the TCR.

[0350] Binding affinity (inversely proportional to the equilibrium constant K_{D}) and binding half-life (expressed as T½) can be determined by any appropriate method. It will be appreciated that doubling the affinity of a TCR results in halving the K_{D}. T½ is calculated as ln 2 divided by the off-rate (koff). So doubling of T½ results in a halving in koff K_{D} and koff values for TCRs are usually measured for soluble forms of the TCR, i.e. those forms which are truncated to remove cytoplasmic and transmembrane domain residues. Therefore it is to be understood that a given TCR has an improved binding affinity for, and/or a binding half-life for the parental TCR if a soluble form of that TCR has the said characteristics. Preferably the binding affinity or binding half-life of a given TCR is measured several times, for example 3 or more times, using the same assay protocol, and an average of the results is taken.

[0351] Since the TCRs of the invention have utility in adoptive therapy, the invention includes a non-naturally occurring and/or purified and/or or engineered cell, especially a T-cell, presenting a TCR of the invention. There are a number of methods suitable for the transfection of T cells with nucleic acid (such as DNA, cDNA or RNA) encoding the TCRs of the invention (see for example Robbins et al., (2008) J Immunol. 180: 6116-6131). T cells expressing the TCRs of the invention will be suitable for use in adoptive therapy-based treatment of cancers such as those of the pancreas and liver. As will be known to those skilled in the art, there are a number of suitable methods by which adoptive therapy can be carried out (see for example Rosenberg et al., (2008) Nat Rev Cancer 8(4): 299-308).

[0352] As is well-known in the art TCRs of the invention may be subject to post-translational modifications when expressed by transfected cells. Glycosylation is one such modification, which may comprise the covalent attachment of oligosaccharide moieties to defined amino acids in the TCR chain. For example, asparagine residues, or serine/threonine residues are well-known locations for oligosaccharide attachment. The glycosylation status of a particular protein depends on a number of factors, including protein sequence, protein conformation and the availability of certain enzymes. Furthermore, glycosylation status (i.e oligosaccharide type, covalent linkage and total number of attachments) can influence protein function. Therefore, when producing recombinant proteins, controlling glycosylation is often desirable. Glycosylation of transfected TCRs may be controlled by mutations of the transfected gene (Kuball J et al. (2009), J Exp Med 206(2):463-475). Such mutations are also encompassed in this invention.

[0353] A TCR may be specific for an antigen in the group MAGE-A1, MAGE-A2, MAGE-A3, MAGE-A4, MAGE-A5, MAGE-A6, MAGE-A7, MAGE-A8, MAGE-A9, MAGE-A10, MAGE-A11, MAGE-A12, MAGE-A13, GAGE-1, GAGE-2, GAGE-3, GAGE-4, GAGE-5, GAGE-6, GAGE-7, GAGE-8, BAGE-1, RAGE-1, LB33/MUM-1, PRAME, NAG, MAGE-Xp2 (MAGE-B2), MAGE-Xp3 (MAGE-B3), MAGE-Xp4 (AGE-B4), tyrosinase, brain glycogen phosphorylase, Melan-A, MAGE-C1, MAGE-C2, NY-ESO-1, LAGE-1, SSX-1, SSX-2(HOM-MEL-40), SSX-1, SSX-4, SSX-5, SCP-1, CT-7, alpha-actinin-4, Bcr-Abl fusion protein, Casp-8, beta-catenin, cdc27, cdk4, cdkn2a, coa-1, dek-can fusion protein, EF2, ETV6-AML1 fusion protein, LDLR-fucosyltransferaseAS fusion protein, HLA-A2, HLA-A11, hsp70-2, KIAA0205, Mart2, Mum-2, and 3, neo-PAP, myosin class I, OS-9, pml-RARa fusion protein, PTPRK, K-ras, N-ras, Triosephosphate isomeras, GnTV, Herv-K-mel, Lage-1, Mage-C2, NA-88, Lage-2, SP17, and TRP2-Int2, (MART-I), gp100 (Pmel 17), TRP-1, TRP-2, MAGE-1, MAGE-3, pi5(58), CEA, NY-ESO (LAGE), SCP-1, Hom/Mel-40, p53, H-Ras, HER-2/neu, BCR-ABL, E2A-PRL, H4-RET, IGH-IGK, MYL-RAR, Epstein Barr virus antigens, EBNA, human papillomavirus (HPV) antigens E6 and E7, TSP-180, MAGE-4, MAGE-5, MAGE-6, pi85erbB2, pi80erbB-3, c-met, nm-23H1, PSA, TAG-72-4, CA 19-9, CA 72-4, CAM 17.1, NuMa, K-ras, beta-catenin, CDK4, Mum-1, p16, TAGE, PSMA, PSCA, CT7, telomerase, 43-9F, 5T4, 791Tgp72, α-fetoprotein, 13HCG, BCA225, BTAA, CA 125, CA 15-3 (CA 27.29\BCAA), CA 195, CA 242, CA-50, CAM43, CD68\KP1, CO-029, FGF-5, G250, Ga733 (EpCAM), HTgp-175, M344, MA-50, MG7-Ag, MOV18, NB\170K, NY-CO-1, RCAS1, SDCCAG16, TA-90 (Mac-2 binding protein\cyclophilin C-associated protein), TAAL6, TAG72, TLP, and TPS.

3.5 Transcription factors

[0354] Regulatory T cells (Treg) are important in maintaining homeostasis, controlling the magnitude and duration of the inflammatory response, and in preventing autoimmune and allergic responses.

[0355] In general, Tregs are thought to be mainly involved in suppressing immune responses, functioning in part as a “self-check” for the immune system to prevent excessive reactions. In particular, Tregs are involved in maintaining tolerance to self-antigens, harmless agents such as pollen or food, and abrogating autoimmune disease.

[0356] Tregs are found throughout the body including, without limitation, the gut, skin, lung, and liver. Additionally, Treg cells may also be found in certain compartments of the body that are not directly exposed to the external environment such as the spleen, lymph nodes, and even adipose tissue. Each of these Treg cell populations is known or suspected to have one or more unique features and additional information may be found in Lehtimaki and Lahesmaa, Regulatory T cells control immune responses through their non-redundant tissue specific features, 2013, FRONTIERS IN IMMUNOL., 4(294): 1-10, the disclosure of which is hereby incorporated in its entirety.

[0357] Typically, Tregs are known to require TGF-0 and IL-2 for proper activation and development. Tregs, expressing abundant amounts of the IL-2 receptor (IL-2R), are reliant on IL-2 produced by activated T cells. Tregs are known to produce both IL-10 and TGF-0, both potent immune suppressive cytokines. Additionally, Tregs are known to inhibit the ability of antigen presenting cells (APCs) to stimulate T cells. One proposed mechanism for APC inhibition is via CTLA-4, which is expressed by Foxp3+ Tregs. It is thought that CTLA-4 may bind to B7 molecules on APCs and either block these molecules or remove them by causing internalization resulting in reduced availability of B7 and an inability to provide adequate co-stimulation for immune responses. Additional discussion regarding the origin, differentiation and function of Tregs may be found in Dhamne et al., Peripheral and thymic Foxp3+ regulatory T cells in search of origin, distinction, and function, 2013, Frontiers in Immunol., 4 (253): 1-11, the disclosure of which is hereby incorporated in its entirety.

[0358] Descriptions and/or amino acid sequences of FOXP3, STAT5B, and/or HELIOS are provided herein and at the www.uniprot.org database at accession numbers: Q9BZS1 (FOXP3), P51692 (STAT5b), and/or Q9UKS7 (HELIOS).

### Foxp3

[0359] In some embodiments, a transcription factor is the Forkhead box P3 transcription factor (Foxp3). Foxp3 has been shown to be a key regulator in the differentiation and activity of Tregs. In fact, loss-of-function mutations in the Foxp3 gene have been shown to lead to the lethal IPEX syndrome (immune dysregulation, polyendocrinopathy, enteropathy, X-linked). Patients with IPEX suffer from severe autoimmune responses, persistent eczema, and colitis. Treg cells expressing Foxp3 play a key role in limiting inflammatory responses in the intestine (Josefowicz, S. Z. et al. Nature, 2012, 482, 395-U1510).

### STAT

[0360] Members of the signal transducer and activator of transcription (STAT) protein family are intracellular transcription factors that mediate many aspects of cellular immunity, proliferation, apoptosis and differentiation. They are primarily activated by membrane receptor-associated Janus kinases (JAK). Dysregulation of this pathway is frequently observed in primary tumors and leads to increased angiogenesis, enhanced survival of tumors and immunosuppression. Gene knockout studies have provided evidence that STAT proteins are involved in the development and function of the immune system and play a role in maintaining immune tolerance and tumor surveillance.

[0361] There are seven mammalian STAT family members that have been identified: STAT1, STAT2, STAT3, STAT4, STAT5 (including STAT5A and STAT5B), and STATE.

[0362] Extracellular binding of cytokines or growth factors induce activation of receptor-associated Janus kinases, which phosphorylate a specific tyrosine residue within the STAT protein promoting dimerization via their SH2 domains. The phosphorylated dimer is then actively transported to the nucleus via an importin a/0 ternary complex. Originally, STAT proteins were described as latent cytoplasmic transcription factors as phosphorylation was thought to be required for nuclear retention. However, unphosphorylated STAT proteins also shuttle between the cytosol and nucleus, and play a role in gene expression. Once STAT reaches the nucleus, it binds to a consensus DNA-recognition motif called gamma-activated sites (GAS) in the promoter region of cytokine-inducible genes and activates transcription. The STAT protein can be dephosphorylated by nuclear phosphatases, which leads to inactivation of STAT and subsequent transport out of the nucleus by an exportin-RanGTP complex.

[0363] In some embodiments, a STAT protein of the present disclosure may be a STAT protein that comprises a modification that modulates its expression level or activity. In some embodiments such modifications include, among other things, mutations that effect STAT dimerization, STAT protein binding to signaling partners, STAT protein localization or STAT protein degradation. In some embodiments, a STAT protein of the present disclosure is constitutively active. In some embodiments, a STAT protein of the present disclosure is constitutively active due to constitutive dimerization. In some embodiments, a STAT protein of the present disclosure is constitutively active due to constitutive phosphorylation as described in Onishi, M. et al., Mol. Cell. Biol. July 1998 vol. 18 no. 7 3871-3879 the entirety of which is herein incorporated by reference.

### 3.6 Vaccines

[0364] In an embodiment, one or more expression sequences encodes an antigen, e.g., a tumor antigen, or a fragment thereof. In some embodiments, expression of such a sequence produces an immunogenic composition, e.g., a vaccine composition capable of raising a specific T-cell response. In some embodiments, an antigen is a neoantigen.

### 4. Cleavage Site

[0365] In some embodiments, two or more expression sequences in a polynucleotide construct may be separated by one or more cleavage site sequences.

[0366] A cleavage site may be any sequence which enables the two or more polypeptides to become separated. A cleavage site may be self-cleaving, such that when the polypeptide is produced, it is immediately cleaved into individual polypeptides without the need for any external cleavage activity.

[0367] A cleavage site may be a furin cleavage site.

[0368] Furin is an enzyme which belongs to the subtilisin-like proprotein convertase family. The members of this family are proprotein convertases that process latent precursor proteins into their biologically active products. Furin is a calcium-dependent serine endoprotease that can efficiently cleave precursor proteins at their paired basic amino acid processing sites. Examples of furin substrates include proparathyroid hormone, transforming growth factor beta 1 precursor, proalbumin, pro-beta-secretase, membrane type-1 matrix metalloproteinase, beta subunit of pro-nerve growth factor and von Willebrand factor. Furin cleaves proteins just downstream of a basic amino acid target sequence (canonically, Arg-X-(Arg/Lys)-Arg) and is enriched in the Golgi apparatus.

[0369] A cleavage site may encode a self-cleaving peptide.

[0370] A cleavage site may operate by ribosome skipping such as the skipping of a glycyl-propyl bond at the C-terminus of a 2A self-cleaving peptide. In some embodiments, steric hinderance causes ribosome skipping. In some embodiments, a 2A self-cleaving peptide contains the sequence GDVEXNPGP (SEQ ID NO: 324), wherein X is E or S. In some embodiments, the protein encoded upstream of the 2A self-cleaving peptide is attached to the 2A self-cleaving peptide except the C-terminal proline post translation. In some embodiments, the protein encoded downstream of the 2A self-cleaving peptide is attached to a proline at its N-terminus post translation.

[0371] A self-cleaving peptide may be a 2A self-cleaving peptide from an aphtho- or a cardiovirus. The primary 2A/2B cleavage of the aptho- and cardioviruses is mediated by 2A cleaving at its own C-terminus. In apthoviruses, such as foot-and-mouth disease viruses (FMDV) and equine rhinitis A virus, the 2A region is a short section of about 18 amino acids, which, together with the N-terminal residue of protein 2B (a conserved proline residue) represents an autonomous element capable of mediating cleavage at its own C-terminus (Donelly et al. (2001)).

[0372] 2A-like sequences have been found in picornaviruses other than aptho- or cardioviruses, ‘picornavirus-like’ insect viruses, type C rotaviruses and repeated sequences within Trypanosoma spp and a bacterial sequence (Donnelly et al. (2001)). The cleavage site may comprise one of these 2A-like sequences, such as those listed in Table 8.

[0373] In some embodiments, a self-cleaving peptide is F2A. In some embodiments, a self-cleaving peptide is derived from foot-and-mouth disease virus. In some embodiments, a self-cleaving peptide is E2A. In some embodiments, a self-cleaving peptide is derived from equine rhinitis A virus. In some embodiments, a self-cleaving peptide is P2A. In some embodiments, a self-cleaving peptide is derived from porcine teschovirus-1. In some embodiments, a self-cleaving peptide is T2A. In some embodiments, a self-cleaving peptide is derived from thosea asigna virus. In some embodiments, a self-cleaving peptide has a sequence listed in Table 8.

[0374] In an embodiment, expression sequences encoding therapeutic proteins separated by a cleavage site have the same level of protein expression.

[0375] In some embodiments, a self-cleaving peptide is described in Liu, Z., Chen, O., Wall, J. B. J. et al. Systematic comparison of 2A peptides for cloning multi-genes in a polycistronic vector. Sci Rep 7, 2193 (2017).

### 5. Polynucleotides Containing a Second IRES

[0376] In some embodiments, the ratios of expression of the therapeutic proteins encoded by the first and second expression sequences can be controlled or influenced by the IRES used in the circRNA and whether a cleavage site or a second IRES separates the first and second expression sequences. When equal expression of the proteins encoded by the first and second expression sequences is desired, the circRNA may encode a cleavage site, e.g., a 2A self-cleaving peptide, between the first expression sequence and the second expression sequence. When greater expression of the protein encoded by the first expression sequence is desired, the circRNA may encode a first IRES and a second IRES, wherein the first IRES is associated with greater expression than the second IRES, or wherein the second IRES is an intergenic region (IGR) IRES. When greater expression of the protein encoded by the second expression sequence is desired, the circRNA may encode a first IRES and a second IRES, wherein the second IRES is associated with greater expression than the first IRES.

[0377] In some embodiments, an RNA polynucleotide contains a first IRES and a second IRES as described herein. In some embodiments, a DNA vector encodes a first IRES and a second IRES as described herein.

[0378] In an embodiment, the first IRES and the second IRES have the same sequence. In an embodiment, the first IRES and the second IRES have different sequences. In an embodiment, the first IRES is an IRES having a sequence as listed in Table 1 (SEQ ID NO: 1-72). In some embodiments, the first IRES is a Salivirus IRES. In some embodiments, the first IRES is a Salivirus SZ1 IRES. In an embodiment, the second IRES is an IRES having a sequence as listed in Table 1 (SEQ ID NO: 1-72). In some embodiments, the second IRES is a Salivirus IRES. In some embodiments, the first IRES is a Salivirus SZ1 IRES.

[0379] In some embodiments, the first IRES is associated with greater expression than the second IRES (e.g., 10%, 20%, 30%, 40%, 50%, 60%, 70%, 80%, 90%, or 100% greater expression when compared using constructs containing a single IRES). In some embodiments, the second IRES is associated with greater expression than the first IRES (e.g., 10%, 20%, 30%, 40%, 50%, 60%, 70%, 80%, 90%, or 100% greater expression when compared using constructs containing a single IRES). In some embodiments, the second IRES is an intergenic region (IGR) IRES.

[0380] Expressing 2 proteins with a single circRNA polynucleotide has advantages over expression using multiple polynucleotides. In some embodiments, expression of 2 proteins from an inventive circRNA polynucleotide leads to more consistent ratios of expression than expression from multiple polynucleotides. In some embodiments, expression of 2 proteins from an inventive circRNA polynucleotide leads to transient expression, which may be desirable over the lasting expression of DNA.

### 6. Production of Polynucleotides

[0381] The vectors provided herein can be made using standard techniques of molecular biology. For example, the various elements of the vectors provided herein can be obtained using recombinant methods, such as by screening cDNA and genomic libraries from cells, or by deriving the polynucleotides from a vector known to include the same.

[0382] The various elements of the vectors provided herein can also be produced synthetically, rather than cloned, based on the known sequences. The complete sequence can be assembled from overlapping oligonucleotides prepared by standard methods and assembled into the complete sequence. See, e.g., Edge, Nature (1981) 292:756; Nambair et al., Science (1984) 223: 1299; and Jay et al., J. Biol. Chem. (1984) 259:6311.

[0383] Thus, particular nucleotide sequences can be obtained from vectors harboring the desired sequences or synthesized completely, or in part, using various oligonucleotide synthesis techniques known in the art, such as site-directed mutagenesis and polymerase chain reaction (PCR) techniques where appropriate. One method of obtaining nucleotide sequences encoding the desired vector elements is by annealing complementary sets of overlapping synthetic oligonucleotides produced in a conventional, automated polynucleotide synthesizer, followed by ligation with an appropriate DNA ligase and amplification of the ligated nucleotide sequence via PCR. See, e.g., Jayaraman et al., Proc. Natl. Acad. Sci. USA (1991) 88:4084-4088. Additionally, oligonucleotide-directed synthesis (Jones et al., Nature (1986) 54:75-82), oligonucleotide directed mutagenesis of preexisting nucleotide regions (Riechmann et al., Nature (1988) 332:323-327 and Verhoeyen et al., Science (1988) 239: 1534-1536), and enzymatic filling-in of gapped oligonucleotides using T4 DNA polymerase (Queen et al., Proc. Natl. Acad. Sci. USA (1989) 86: 10029-10033) can be used.

[0384] The precursor RNA provided herein can be generated by incubating a vector provided herein under conditions permissive of transcription of the precursor RNA encoded by the vector. For example, in some embodiments a precursor RNA is synthesized by incubating a vector provided herein that comprises an RNA polymerase promoter upstream of its 5′ duplex forming region and/or expression sequences with a compatible RNA polymerase enzyme under conditions permissive of in vitro transcription. In some embodiments, the vector is incubated inside of a cell by a bacteriophage RNA polymerase or in the nucleus of a cell by host RNA polymerase II.

[0385] In certain embodiments, provided herein is a method of generating precursor RNA by performing in vitro transcription using a vector provided herein as a template (e.g., a vector provided herein with a RNA polymerase promoter positioned upstream of the 5′ duplex forming region).

[0386] In certain embodiments, the resulting precursor RNA can be used to generate circular RNA (e.g., a circular RNA polynucleotide provided herein) by incubating it in the presence of magnesium ions and guanosine nucleotide or nucleoside at a temperature at which RNA circularization occurs (e.g., between 20° C. and 60° C.).

[0387] Thus, in certain embodiments provided herein is a method of making circular RNA. In certain embodiments, the method comprises synthesizing precursor RNA by transcription (e.g., run-off transcription) using a vector provided herein (e.g., a post splicing 3′ group I intron fragment, an Internal Ribosome Entry Site (IRES), an expression sequence, a polynucleotide sequence encoding a cleavage site, a second expression sequence, and a 5′ group I intron fragment) as a template, and incubating the resulting precursor RNA in the presence of divalent cations (e.g., magnesium ions) and GTP such that it circularizes to form circular RNA. In some embodiments, the precursor RNA disclosed herein is capable of circularizing in the absence of magnesium ions and GTP and/or without the step of incubation with magnesium ions and GTP. It has been discovered that circular RNA has reduced immunogenicity relative to a corresponding mRNA, at least partially because the mRNA contains an immunogenic 5′ cap. When transcribing a DNA vector from certain promoters (e.g., a T7 promoter) to produce a precursor RNA, it is understood that the 5′ end of the precursor RNA is G. To reduce the immunogenicity of a circular RNA composition that contains a low level of contaminant linear mRNA, an excess of GMP relative to GTP can be provided during transcription such that most transcripts contain a 5′ GMP, which cannot be capped. Therefore, in some embodiments, transcription is carried out in the presence of an excess of GMP. In some embodiments, transcription is carried out where the ratio of GMP concentration to GTP concentration is within the range of about 3:1 to about 15:1, for example, about 3:1 to about 10:1, about 3:1 to about 5:1, about 3:1, about 4:1, or about 5:1.

[0388] In some embodiments, a composition comprising circular RNA has been purified. Circular RNA may be purified by any known method commonly used in the art, such as column chromatography, gel filtration chromatography, and size exclusion chromatography. In some embodiments, purification comprises one or more of the following steps: phosphatase treatment, HPLC size exclusion purification, and RNase R digestion. In some embodiments, purification comprises the following steps in order: RNase R digestion, phosphatase treatment, and HPLC size exclusion purification. In some embodiments, purification comprises reverse phase HPLC. In some embodiments, a purified composition contains less double stranded RNA, DNA splints, triphosphorylated RNA, phosphatase proteins, protein ligases, capping enzymes and/or nicked RNA than unpurified RNA. In some embodiments, a purified composition is less immunogenic than an unpurified composition. In some embodiments, immune cells exposed to a purified composition produce less TNFα, RIG-I, IL-2, IL-6, IFNγ, and/or a type 1 interferon, e.g., IFN-β1, than immune cells exposed to an unpurified composition.

### 7. Nanoparticles

[0389] In certain aspects, provided herein are pharmaceutical compositions comprising the circular RNA provided herein. In certain embodiments, such pharmaceutical compositions are formulated with nanoparticles to facilitate delivery.

[0390] In certain embodiments, the circular RNA provided herein may be delivered and/or targeted to a cell in a transfer vehicle, e.g., a nanoparticle, or a composition comprising a nanoparticle. In some embodiments, the circular RNA may also be delivered to a subject in a transfer vehicle or a composition comprising a transfer vehicle. In some embodiments, the transfer vehicle is a nanoparticle. In some embodiments, the nanoparticle is a lipid nanoparticle, a solid lipid nanoparticle, a polymeric core-shell nanoparticle, or a biodegradable nanoparticle. In some embodiments, the transfer vehicle comprises or is coated with one or more cationic lipids, non-cationic lipids, ionizable lipids, PEG-modified lipids, polyglutamic acid polymers, Hyaluronic acid polymers, poly n-amino esters, poly beta amino peptides, or positively charged peptides.

[0391] In one embodiment, the transfer vehicle may be selected and/or prepared to optimize delivery of the circRNA to a target cell. For example, if the target cell is a hepatocyte, the properties of the transfer vehicle (e.g., size, charge and/or pH) may be optimized to effectively deliver such transfer vehicle to the target cell, reduce immune clearance and/or promote retention in that target cell.

[0392] The use of transfer vehicles to facilitate the delivery of nucleic acids to target cells is contemplated by the present invention. Liposomes (e.g., liposomal lipid nanoparticles) are generally useful in a variety of applications in research, industry, and medicine, particularly for their use as transfer vehicles of diagnostic or therapeutic compounds in vivo (Lasic, Trends Biotechnol., 16: 307-321, 1998; Drummond et al., Pharmacol. Rev., 51: 691-743, 1999) and are usually characterized as microscopic vesicles having an interior aqueous space sequestered from an outer medium by a membrane of one or more bilayers. Bilayer membranes of liposomes are typically formed by amphiphilic molecules, such as lipids of synthetic or natural origin that comprise spatially separated hydrophilic and hydrophobic domains (Lasic, Trends Biotechnol., 16: 307-321, 1998). Bilayer membranes of the liposomes can also be formed by amphiphilic polymers and surfactants (e.g., polymerosomes, niosomes, etc.).

[0393] In the context of the present invention, a transfer vehicle typically serves to transport the circRNA to the target cell. For the purposes of the present invention, the transfer vehicles are prepared to contain or encapsulate the desired nucleic acids. The process of incorporation of a desired entity (e.g., a nucleic acid) into a liposome is often referred to as loading (Lasic, et al., FEBS Lett., 312: 255-258, 1992). The liposome-incorporated nucleic acids may be completely or partially located in the interior space of the liposome, within the bilayer membrane of the liposome, or associated with the exterior surface of the liposome membrane. The purpose of incorporating a circRNA into a transfer vehicle, such as a liposome, is often to protect the nucleic acid from an environment which may contain enzymes or chemicals that degrade nucleic acids and/or systems or receptors that cause the rapid excretion of the nucleic acids. Accordingly, in an embodiment of the present invention, the selected transfer vehicle is capable of enhancing the stability of the circRNA contained therein. The liposome can allow the encapsulated circRNA to reach the target cell, or alternatively limit the delivery of such circRNA to other sites or cells where the presence of the administered circRNA may be useless or undesirable. Furthermore, incorporating the circRNA into a transfer vehicle, such as, for example, a cationic liposome, also facilitates the delivery of such circRNA into a target cell. In some embodiments, a transfer vehicle disclosed herein may serve to promote endosomal or lysosomal release of, for example, contents that are encapsulated in the transfer vehicle (e.g., lipid nanoparticle).

[0394] Ideally, transfer vehicles are prepared to encapsulate one or more desired circRNA such that the compositions demonstrate a high transfection efficiency and enhanced stability. While liposomes can facilitate introduction of nucleic acids into target cells, the addition of polycations (e.g., poly L-lysine and protamine), as a copolymer can in some instances markedly enhance the transfection efficiency of several types of cationic liposomes by 2-28 fold in a number of cell lines both in vitro and in vivo. (See N J. Caplen, et al., Gene Ther. 1995; 2: 603; S. Li, et al., Gene Ther. 1997; 4, 891.)

[0395] In certain embodiments disclosed herein are ionizable lipids that may be used as a component of a transfer vehicle to facilitate or enhance the delivery and release of circular RNA to one or more target cells (e.g., by permeating or fusing with the lipid membranes of such target cells). In certain embodiments, an ionizable lipid comprises one or more cleavable functional groups (e.g., a disulfide) that allow, for example, a hydrophilic functional head-group to dissociate from a lipophilic functional tail-group of the compound (e.g., upon exposure to oxidative, reducing or acidic conditions), thereby facilitating a phase transition in the lipid bilayer of the one or more target cells.

[0396] In some embodiments, an ionizable lipid is a lipid as described in international patent application PCT/US2018/058555.

[0397] In some of embodiments, a cationic lipid has the following formula:

[chemical structure]

wherein:
[0398] R₁ and R₂ are either the same or different and independently optionally substituted C₁₀-C₂₄ alkyl, optionally substituted C₁₀-C₂₄ alkenyl, optionally substituted C₁₀-C₂₄ alkynyl, or optionally substituted C₁₀-C₂₄ acyl;
[0399] R₃ and R₄ are either the same or different and independently optionally substituted C₁-C₆ alkyl, optionally substituted C₂-C₆ alkenyl, or optionally substituted C₂-C₆ alkynyl or R₃ and R₄ may join to form an optionally substituted heterocyclic ring of 4 to 6 carbon atoms and 1 or 2 heteroatoms chosen from nitrogen and oxygen;
[0400] R₅ is either absent or present and when present is hydrogen or C₁-C₆ alkyl; m, n, and p are either the same or different and independently either 0 or 1 with the proviso that m, n, and p are not simultaneously 0; q is 0, 1, 2, 3, or 4; and
[0401] Y and Z are either the same or different and independently O, S, or NH.

[0402] In one embodiment, R₁ and R₂ are each linoleyl, and the amino lipid is a dilinoleyl amino lipid.

[0403] In one embodiment, the amino lipid is a dilinoleyl amino lipid.

[0404] In various other embodiments, a cationic lipid has the following structure:

[chemical structure]

or a pharmaceutically acceptable salt, tautomer, prodrug or stereoisomer thereof, wherein:
[0405] R₁ and R₂ are each independently selected from the group consisting of H and C₁-C₃ alkyls; and
[0406] R₃ and R₄ are each independently an alkyl group having from about 10 to about 20 carbon atoms, wherein at least one of R₃ and R₄ comprises at least two sites of unsaturation.

[0407] In some embodiments, R₃ and R₄ are each independently selected from dodecadienyl, tetradecadienyl, hexadecadienyl, linoleyl, and icosadienyl. In an embodiment, R₃ and R₄ and are both linoleyl. In some embodiments, R₃ and/or R₄ may comprise at least three sites of unsaturation (e.g., R₃ and/or R₄ may be, for example, dodecatrienyl, tetradectrienyl, hexadecatrienyl, linolenyl, and icosatrienyl).

[0408] In some embodiments, a cationic lipid has the following structure:

[chemical structure]

or a pharmaceutically acceptable salt, tautomer, prodrug or stereoisomer thereof, wherein:
[0409] R₁ and R₂ are each independently selected from H and C₁-C₃ alkyls;
[0410] R₃ and R₄ are each independently an alkyl group having from about 10 to about 20 carbon atoms, wherein at least one of R₃ and R₄ comprises at least two sites of unsaturation.

[0411] In one embodiment, R₃ and R₄ are the same, for example, in some embodiments R₃ and R₄ are both linoleyl (C₁₈-alkyl). In another embodiment, R₃ and R₄ are different, for example, in some embodiments, R₃ is tetradectrienyl (C₁₄-alkyl) and R₄ is linoleyl (Cis-alkyl). In a preferred embodiment, the cationic lipid(s) of the present invention are symmetrical, i.e., R₃ and R₄ are the same. In another preferred embodiment, both R₃ and R₄ comprise at least two sites of unsaturation. In some embodiments, R₃ and R₄ are each independently selected from dodecadienyl, tetradecadienyl, hexadecadienyl, linoleyl, and icosadienyl. In an embodiment, R₃ and R₄ are both linoleyl. In some embodiments, R₃ and/or R₄ comprise at least three sites of unsaturation and are each independently selected from dodecatrienyl, tetradectrienyl, hexadecatrienyl, linolenyl, and icosatrienyl.

[0412] In various embodiments, a cationic lipid has the formula:

[chemical structure]

or a pharmaceutically acceptable salt, tautomer, prodrug or stereoisomer thereof, wherein:
[0413] Xₐₐ is a D- or L-amino acid residue having the formula —NR^{N}—CR¹R²—C(C═O)—, or a peptide or a peptide of amino acid residues having the formula —{NR^{N}—CR¹R²—C(C═O)}ₙ—, wherein n is an integer from 2 to 20;
[0414] R¹ is independently, for each occurrence, a non-hydrogen or a substituted or unsubstituted side chain of an amino acid;
[0415] R² and R^{N} are independently, for each occurrence, hydrogen, an organic group consisting of carbon, oxygen, nitrogen, sulfur, and hydrogen atoms, or any combination of the foregoing, and having from 1 to 20 carbon atoms, C₍₁₋₅₎alkyl, cycloalkyl, cycloalkylalkyl, C₍₁₋₅₎alkenyl, C₍₁₋₅₎alkynyl, C₍₁₋₅₎alkanoyl, C₍₁₋₅₎alkanoyloxy, C₍₁₋₅₎alkoxy, C₍₁₋₅₎alkoxy-C₍₁₋₅₎alkyl, C₍₁₋₅₎alkoxy-C₍₁₋₅₎alkoxy, C₍₁₋₅₎alkyl-amino-C₍₁₋₅₎alkyl-, C₍₁₋₅₎dialkyl-amino-C₍₁₋₅₎alkyl-, nitro-C₍₁₋₅₎alkyl, cyano-C₍₁₋₅₎alkyl, aryl-C₍₁₋₅₎alkyl, 4-biphenyl-C₍₁₋₅₎alkyl, carboxyl, or hydroxyl;
[0416] Z is —NH—, —O—, —S—, —CH₂S—, —CH₂S(O)—, or an organic linker consisting of 1-40 atoms selected from hydrogen, carbon, oxygen, nitrogen, and sulfur atoms (preferably, Z is —NH— or —O—);
[0417] R^{x} and R^{y} are, independently, (i) a lipophilic tail derived from a lipid (which can be naturally occurring or synthetic), e.g., a phospholipid, a glycolipid, a triacylglycerol, a glycerophospholipid, a sphingolipid, a ceramide, a sphingomyelin, a cerebroside, or a ganglioside, wherein the tail optionally includes a steroid; (ii) an amino acid terminal group selected from hydrogen, hydroxyl, amino, and an organic protecting group; or (iii) a substituted or unsubstituted C₍₃₋₂₂₎alkyl, C₍₆₋₁₂₎cycloalkyl, C₍₆₋₁₂₎cycloalkyl-C₍₃₋₂₂₎alkyl, C₍₃₋₂₂₎alkenyl, C₍₃₋₂₂₎alkynyl, C₍₃₋₂₂₎alkoxy, or C₍₆₋₁₂₎-alkoxy C₍₃₋₂₂₎alkyl;

[0418] In some embodiments, one of R^{x} and R^{Y} is a lipophilic tail as defined above and the other is an amino acid terminal group. In some embodiments, both R^{x} and R^{Y} are lipophilic tails.

[0419] In some embodiments, at least one of R^{x} and R^{y} is interrupted by one or more biodegradable groups (e.g., —OC(O)—, —C(O)O—, —SC(O)—, —C(O)S—, —OC(S)—, —C(S)O—, —S—S—, —C(O)(NR⁵)—, —N(R⁵)C(O)—, —C(S)(NR⁵)—, —N(R⁵)C(O)—, —N(R⁵)C(O)N(R⁵)—, —OC(O)O—, —OSi(R⁵)₂O—, —C(O)(CR³R₄)C(O)O—, —OC(O)(CR³R₄)C(O)—, or

[chemical structure]

[0420] In some embodiments, R¹¹ is a C₂-C₈alkyl or alkenyl.

[0421] In some embodiments, each occurrence of R⁵ is, independently, H or alkyl.

[0422] In some embodiments, each occurrence of R³ and R⁴ are, independently H, halogen, OH, alkyl, alkoxy, —NH₂, alkylamino, or dialkylamino; or R₃ and R₄, together with the carbon atom to which they are directly attached, form a cycloalkyl group. In some particular embodiments, each occurrence of R³ and R⁴ are, independently H or C₁-C₄alkyl.

[0423] In some embodiments, R^{x} and R^{y} each, independently, have one or more carbon-carbon double bonds.

[0424] In some embodiments, the cationic lipid is one of the following:

[chemical structure]

or a pharmaceutically acceptable salt, tautomer, prodrug or stereoisomer thereof, wherein:
[0425] R₁ and R₂ are each independently alkyl, alkenyl, or alkynyl, each of which can optionally substituted;
[0426] R₃ and R₄ are each independently a C₁-C₆ alkyl, or R₃ and R₄ are taken together to form an optionally substituted heterocyclic ring.

[0427] A representative useful dilinoleyl amino lipid has the formula:

[chemical structure]

wherein n is 0, 1, 2, 3, or 4.

[0428] In one embodiment, a cationic lipid is DLin-K-DMA. In one embodiment, a cationic lipid is DLin-KC2-DMA (DLin-K-DMA above, wherein n is 2).

[0429] In one embodiment, a cationic lipid has the following structure:

[chemical structure]

or a pharmaceutically acceptable salt, tautomer, prodrug or stereoisomer thereof, wherein:
[0430] R₁ and R₂ are each independently for each occurrence optionally substituted C₁₀-C₃₀ alkyl, optionally substituted C₁₀-C₃₀ alkenyl, optionally substituted C₁₀-C₃₀ alkynyl or optionally substituted C₁₀-C₃₀ acyl;
[0431] R₃ is H, optionally substituted C₂-C₁₀ alkyl, optionally substituted C₂-C₁₀ alkenyl, optionally substituted C₂-C₁₀ alkylyl, alkylhetrocycle, alkylpbosphate, alkylphosphorothioate, alkylphosphorodithioate, alkylphosphonate, alkylamine, hydroxyalkyl, ω-aminoalkyl, ω-(substituted)aminoalkyl, ω-phosphoalkyl, ω-thiophosphoalkyl, optionally substituted polyethylene glycol (PEG, mw 100-40K), optionally substituted mPEG (mw 120-40K), heteroaryl, or heterocycle, or a linker ligand, for example, in some embodiments, R₃ is (CH₃)₂N(CH₂)ₙ—, wherein n is 1, 2, 3 or 4;
[0432] E is O, S, N(Q), C(O), OC(O), C(O)O, N(Q)C(O), C(O)N(Q), (Q)N(CO)O, O(CO)N(Q), S(O), NS(O)₂N(Q), S(O)₂, N(Q)S(O)₂, SS, O═N, aryl, heteroaryl, cyclic or heterocycle, for example —C(O)O, wherein - is a point of connection to R₃; and
[0433] Q is H, alkyl, ω-aminoalkyl, ω-(substituted)aminoalkyl, ω-phosphoalkyl or ω-thiophosphoalkyl.

[0434] In one specific embodiment, the cationic lipid of Embodiments 1, 2, 3, 4 or 5 has the following structure

[chemical structure]

or a pharmaceutically acceptable salt, tautomer, prodrug or stereoisomer thereof, wherein:
[0435] E is O, S, N(Q), C(O), N(Q)C(O), C(O)N(Q), (Q)N(CO)O, O(CO)N(Q), S(O), NS(O), N(Q), S(O)₂, N(Q)S(O, SS, O═N, aryl, heteroaryl, cyclic or heterocycle;
[0436] Q is H, alkyl, ω-aminoalkyl, ω-(substituted)amninoalky, ω-phosphoalkyl or α-thiophosphoalkyl;
[0437] R₁ and R₂ and Rₓ are each independently for each occurrence H, optionally substituted C₁-C₁₀ alkyl, optionally substituted C₁₀-C₃₀ alkyl, optionally substituted C₁-C₃₆ alkenyl, optionally substituted C₁₀-C₃₀ alkynyl, optionally substituted C₁₀-C₃₀ acyl, or linker-ligand, provided that at least one of R₁, R₂ and Rₓ is no H;
[0438] R₃ is H, optionally substituted C₁-C₁₀ alkyl, optionally substituted C₂-C₁₀ alkenyl, optionally substituted C₂-C₁₀ alkynyl, alkylhetrocycle, alkylphosphate, alkylphosphorothioate, alkylphosphorodithioate, alkylphosphonate, allkylamine, hydroxyalkyl, ω-aminoalkyl, ω-(substituted)aminoalkyl, ω-phosphoalkyl, ω-thiophosphoalkyl, optionally substituted polyethylene glycol (PEG, mw 100-40K), optionally substituted mPEG (mw 120-40K), heteroaryl, or heterocycle, or linker-ligand; and
[0439] n is 0, 1, 2, or 3.

[0440] In one embodiment, the cationic lipid of Embodiments 1, 2, 3, 4 or 5 has the structure of Formula I:

[chemical structure]

or a pharmaceutically acceptable salt, tautomer, prodrug or stereoisomer thereof, wherein:
[0441] one of L¹ or L² is —O(C═O)—, —(C═O)O—, —C(═O)—, —O—, —S(O)ₓ—, —S—S—, —C(═O)S—, SC(═O)—, —NR^{a}C(═O)—, —C(═O)NR^{a}—, NR^{a}C(═O)NR^{a}—, —OC(═O)NR^{a}— or —NR^{a}C(═O)O—, and the other of L¹ or L² is —O(C═O)—, —(C═O)O—, —C(═O)—, —O—, —S(O)ₓ—, —S—S—, —C(═O)S—, SC(═O)—, —NR^{a}C(═O)—, —C(═O)NR^{a}—, NR^{a}C(═O)NR^{a}—, —OC(═O)NR^{a}— or —NR^{a}C(═O)O— or a direct bond;
[0442] R^{a} is H or C₁-C₁₂ alkyl;
[0443] R^{1a} and R^{1b} are, at each occurrence, independently either (a) H or C₁-C₁₂ alkyl, or (b) R^{1a} is H or C₁-C₁₂ alkyl, and R^{1b} together with the carbon atom to which it is bound is taken together with an adjacent R^{1b} and the carbon atom to which it is bound to form a carbon-carbon double bond;
[0444] R^{2a} and R^{2b} are, at each occurrence, independently either (a) H or C₁-C₁₂ alkyl, or (b) R^{2a} is H or C₁-C₁₂ alkyl, and R^{2b} together with the carbon atom to which it is bound is taken together with an adjacent R^{2b} and the carbon atom to which it is bound to form a carbon-carbon double bond;
[0445] R^{3a} and R^{3b} are, at each occurrence, independently either (a) H or C₁-C₁₂ alkyl, or (b) R^{3a} is H or C₁-C₁₂ alkyl, and R^{3b} together with the carbon atom to which it is bound is taken together with an adjacent R^{3b} and the carbon atom to which it is bound to form a carbon-carbon double bond;
[0446] R^{4a} and R^{4b} are, at each occurrence, independently either (a) H or C₁-C₁₂ alkyl, or (b) R^{4a} is H or C₁-C₁₂ alkyl, and R^{4b} together with the carbon atom to which it is bound is taken together with an adjacent R^{4b} and the carbon atom to which it is bound to form a carbon-carbon double bond;
[0447] R⁵ and R⁶ are each independently methyl or cycloalkyl;
[0448] R⁷ is, at each occurrence, independently H or C₁-C₁₂ alkyl;
[0449] R⁸ and R⁹ are each independently unsubstituted C₁-C₁₂ alkyl; or R⁸ and R⁹, together with the nitrogen atom to which they are attached, form a 5, 6 or 7-membered heterocyclic ring comprising one nitrogen atom;
[0450] a and d are each independently an integer from 0 to 24;
[0451] b and c are each independently an integer from 1 to 24;
[0452] e is 1 or 2; and
[0453] x is 0, 1 or 2.

[0454] In some embodiments of Formula I, L¹ and L² are independently —O(C═O)— or —(C═O)O—.

[0455] In certain embodiments of Formula I, at least one of R^{1a}, R^{2a}, R^{3a}, or R^{4a} is C₁-C₁₂ alkyl, or at least one of L¹ or L² is —O(C═O)— or —(C═O)O—. In other embodiments, R^{1a} and R^{1b} are not isopropyl when a is 6 or n-butyl when a is 8.

[0456] In still further embodiments of Formula I, at least one of R^{1a}, R^{2a}, R^{3a} or R^{4a} is C₁-C₁₂ alkyl, or at least one of L¹ or L² is —O(C═O)— or —(C═O)O—; and
[0457] R^{1a} and R^{1b} are not isopropyl when a is 6 or n-butyl when a is 8.

[0458] In other embodiments of Formula I, R⁸ and R⁹ are each independently unsubstituted C₁-C₁₂ alkyl; or R⁸ and R⁹, together with the nitrogen atom to which they are attached, form a 5, 6 or 7-membered heterocyclic ring comprising one nitrogen atom;

[0459] In certain embodiments of Formula I, any one of L¹ or L² may be —O(C═O)— or a carbon-carbon double bond. L¹ and L² may each be —O(C═O)— or may each be a carbon-carbon double bond.

[0460] In some embodiments of Formula I, one of L¹ or L² is —O(C═O)—. In other embodiments, both L¹ and L² are —O(C═O)—.

[0461] In some embodiments of Formula I, one of L¹ or L² is —(C═O)O—. In other embodiments, both L and L² are —(C═O)O—.

[0462] In some other embodiments of Formula I, one of L¹ or L² is a carbon-carbon double bond. In other embodiments, both L¹ and L² are a carbon-carbon double bond.

[0463] In still other embodiments of Formula I, one of L¹ or L² is —O(C═O)— and the other of L¹ or L² is —(C═O)O—. In more embodiments, one of L¹ or L² is —O(C═O)— and the other of L¹ or L² is a carbon-carbon double bond. In yet more embodiments, one of L¹ or L² is —(C═O)O— and the other of L¹ or L² is a carbon-carbon double bond.

[0464] It is understood that “carbon-carbon” double bond, as used throughout the specification, refers to one of the following structures:

[chemical structure]

wherein R^{a} and R^{b} are, at each occurrence, independently H or a substituent. For example, in some embodiments R^{a} and R^{b} are, at each occurrence, independently H, C₁-C₁₂ alkyl or cycloalkyl, for example H or C₁-C₁₂ alkyl.

[0465] In other embodiments, the lipid compounds of Formula I have the following Formula (Ia):

[chemical structure]

[0466] In other embodiments, the lipid compounds of Formula I have the following Formula (Ib):

[chemical structure]

[0467] In yet other embodiments, the lipid compounds of Formula I have the following Formula (Ic):

[chemical structure]

[0468] In certain embodiments of the lipid compound of Formula I, a, b, c and d are each independently an integer from 2 to 12 or an integer from 4 to 12. In other embodiments, a, b, c and d are each independently an integer from 8 to 12 or 5 to 9. In some certain embodiments, a is 0. In some embodiments, a is 1. In other embodiments, a is 2. In more embodiments, a is 3. In yet other embodiments, a is 4. In some embodiments, a is 5. In other embodiments, a is 6. In more embodiments, a is 7. In yet other embodiments, a is 8. In some embodiments, a is 9. In other embodiments, a is 10. In more embodiments, a is 11. In yet other embodiments, a is 12. In some embodiments, a is 13. In other embodiments, a is 14. In more embodiments, a is 15. In yet other embodiments, a is 16.

[0469] In some other embodiments of Formula I, b is 1. In other embodiments, b is 2. In more embodiments, b is 3. In yet other embodiments, b is 4. In some embodiments, b is 5. In other embodiments, b is 6. In more embodiments, b is 7. In yet other embodiments, b is 8. In some embodiments, b is 9. In other embodiments, b is 10. In more embodiments, b is 11. In yet other embodiments, b is 12. In some embodiments, b is 13. In other embodiments, b is 14. In more embodiments, b is 15. In yet other embodiments, b is 16.

[0470] In some more embodiments of Formula I, c is 1. In other embodiments, c is 2. In more embodiments, c is 3. In yet other embodiments, c is 4. In some embodiments, c is 5. In other embodiments, c is 6. In more embodiments, c is 7. In yet other embodiments, c is 8. In some embodiments, c is 9. In other embodiments, c is 10. In more embodiments, c is 11. In yet other embodiments, c is 12. In some embodiments, c is 13. In other embodiments, c is 14. In more embodiments, c is 15. In yet other embodiments, c is 16.

[0471] In some certain other embodiments of Formula I, d is 0. In some embodiments, d is 1. In other embodiments, d is 2. In more embodiments, d is 3. In yet other embodiments, d is 4. In some embodiments, d is 5. In other embodiments, d is 6. In more embodiments, d is 7. In yet other embodiments, d is 8. In some embodiments, d is 9. In other embodiments, d is 10. In more embodiments, d is 11. In yet other embodiments, d is 12. In some embodiments, d is 13. In other embodiments, d is 14. In more embodiments, d is 15. In yet other embodiments, d is 16. In some other various embodiments of Formula I, a and d are the same. In some other embodiments, b and c are the same. In some other specific embodiments, a and d are the same and b and c are the same.

[0472] The sum of a and b and the sum of c and d in Formula I are factors which may be varied to obtain a lipid of formula I having the desired properties. In one embodiment, a and b are chosen such that their sum is an integer ranging from 14 to 24. In other embodiments, c and d are chosen such that their sum is an integer ranging from 14 to 24. In further embodiment, the sum of a and b and the sum of c and d are the same. For example, in some embodiments the sum of a and b and the sum of c and d are both the same integer which may range from 14 to 24. In still more embodiments, a, b, c and d are selected such the sum of a and b and the sum of c and d is 12 or greater.

[0473] In some embodiments of Formula I, e is 1. In other embodiments, e is 2.

[0474] The substituents at R^{1a}, R^{2a}, R^{3a} and R^{4a} of Formula I are not particularly limited. In certain embodiments R^{1a}, R^{2a}, R^{3a} and R^{4a} are H at each occurrence. In certain other embodiments at least one of R^{1a}, R^{2a}, R^{3a} and R^{4a} is C₁-C₁₂ alkyl. In certain other embodiments at least one of R^{1a}, R^{2a}, R^{3a} and R^{4a} is C₁-C₈ alkyl. In certain other embodiments at least one of R^{1a}, R^{2a}, R^{3a} and R^{4a} is C₁-C₆ alkyl. In some of the foregoing embodiments, the C₁-C₈ alkyl is methyl, ethyl, n-propyl, iso-propyl, n-butyl, iso-butyl, tert-butyl, n-hexyl or n-octyl.

[0475] In certain embodiments of Formula I, R^{1a}, R^{1b}, R^{4a} and R^{4b} are C₁-C₁₂ alkyl at each occurrence.

[0476] In further embodiments of Formula I, at least one of R^{1b}, R^{2b}, R^{3b} and R^{4b} is H or R^{1b}, R^{2b}, R^{3b} and R^{4b} are H at each occurrence.

[0477] In certain embodiments of Formula I, R^{1b} together with the carbon atom to which it is bound is taken together with an adjacent R^{1b} and the carbon atom to which it is bound to form a carbon-carbon double bond. In other embodiments of the foregoing R^{4b} together with the carbon atom to which it is bound is taken together with an adjacent R^{4b} and the carbon atom to which it is bound to form a carbon-carbon double bond.

[0478] The substituents at R⁵ and R⁶ of Formula I are not particularly limited in the foregoing embodiments. In certain embodiments one or both of R⁵ or R⁶ is methyl. In certain other embodiments one or both of R⁵ or R⁶ is cycloalkyl for example cyclohexyl. In these embodiments the cycloalkyl may be substituted or not substituted. In certain other embodiments the cycloalkyl is substituted with C₁-C₁₂ alkyl, for example tert-butyl.

[0479] The substituents at R⁷ are not particularly limited in the foregoing embodiments of Formula I. In certain embodiments at least one R⁷ is H. In some other embodiments, R⁷ is H at each occurrence. In certain other embodiments R⁷ is C₁-C₁₂ alkyl.

[0480] In certain other of the foregoing embodiments of Formula I, one of R⁸ or R⁹ is methyl. In other embodiments, both R⁸ and R⁹ are methyl.

[0481] In some different embodiments of Formula I, R⁸ and R⁹, together with the nitrogen atom to which they are attached, form a 5, 6 or 7-membered heterocyclic ring. In some embodiments of the foregoing, R⁸ and R⁹, together with the nitrogen atom to which they are attached, form a 5-membered heterocyclic ring, for example a pyrrolidinyl ring.

[0482] In some embodiments of Embodiment 3, the first and second cationic lipids are each, independently selected from a lipid of Formula I.

[0483] In various different embodiments, the lipid of Formula I has one of the structures set forth in Table 1 below.

TABLE 1
Representative Lipids of Formula I

| No. | Structure | pKa |
|---|---|---|
| I-1 | [chemical structure] | — |
| I-2 | [chemical structure] | 5.64 |
| I-3 | [chemical structure] | 7.15 |
| I-4 | [chemical structure] | 6.43 |
| I-5 | [chemical structure] | 6.28 |
| I-6 | [chemical structure] | 6.12 |
| I-7 | [chemical structure] | — |
| I-8 | [chemical structure] | — |
| I-9 | [chemical structure] | — |
| I-10 | [chemical structure] | — |
| I-11 | [chemical structure] | 6.36 |
| I-12 | [chemical structure] | — |
| I-13 | [chemical structure] | 6.51 |
| I-14 | [chemical structure] | — |
| I-15 | [chemical structure] | 6.30 |
| I-16 | [chemical structure] | 6.63 |
| I-17 | [chemical structure] | — |
| I-18 | [chemical structure] | — |
| I-19 | [chemical structure] | 6.72 |
| I-20 | [chemical structure] | 6.44 |
| I-21 | [chemical structure] | 6.28 |
| I-22 | [chemical structure] | 6.53 |
| I-23 | [chemical structure] | 6.24 |
| I-24 | [chemical structure] | 6.28 |
| I-25 | [chemical structure] | 6.20 |
| I-33 | [chemical structure] | 6.27 |
| I-34 | [chemical structure] | — |
| I-35 | [chemical structure] | 6.21 |
| I-36 | [chemical structure] | — |
| I-37 | [chemical structure] | — |
| I-38 | [chemical structure] | 6.24 |
| I-39 | [chemical structure] | 6.82 |
| I-40 | [chemical structure] | 6.38 |
| I-41 | [chemical structure] | 5.91 |

[0484] In some embodiments, the cationic lipid of Embodiments 1, 2, 3, 4 or 5 has a structure of Formula II:

[chemical structure]

or a pharmaceutically acceptable salt, tautomer, prodrug or stereoisomer thereof, wherein:
[0485] one of L¹ or L² is —O(C═O)—, —(C═O)O—, —C(═O)—, —O—, —S(O)ₓ—, —S—S—, —C(═O)S—, SC(═O)—, —NR^{a}C(═O)—, —C(═O)NR^{a}—, NR^{a}C(═O)NR^{a}—, —OC(═O)NR^{a}— or —NR^{a}C(═O)O—, and the other of L¹ or L² is —O(C═O)—, —(C═O)O—, —C(═O)—, —O—, —S(O)ₓ—, —S—S—, —C(═O)S—, SC(═O)—, —NR^{a}C(═O)—, —C(═O)NR^{a}—, NR^{a}C(═O)NR^{a}—, —OC(═O)NR^{a}— or —NR^{a}C(═O)O— or a direct bond;
[0486] G¹ is C₁-C₂ alkylene, —(C═O)—, —O(C═O)—, —SC(═O)—, —NR^{a}C(═O)— or a direct bond;
[0487] G² is —C(═O)—, —(C═O)O—, —C(═O)S—, —C(═O)NR^{a}— or a direct bond;
[0488] G³ is C₁-C₆ alkylene;
[0489] R^{a} is H or C₁-C₁₂ alkyl;
[0490] R^{1a} and R^{1b} are, at each occurrence, independently either: (a) H or C₁-C₁₂ alkyl; or (b) R^{1a} is H or C₁-C₁₂ alkyl, and R^{1b} together with the carbon atom to which it is bound is taken together with an adjacent Rib and the carbon atom to which it is bound to form a carbon-carbon double bond;
[0491] R^{2a} and R^{2b} are, at each occurrence, independently either: (a) H or C₁-C₁₂ alkyl; or (b) R^{2a} is H or C₁-C₁₂ alkyl, and R^{2b} together with the carbon atom to which it is bound is taken together with an adjacent R^{2b} and the carbon atom to which it is bound to form a carbon-carbon double bond;
[0492] R^{3a} and R^{3b} are, at each occurrence, independently either (a): H or C₁-C₁₂ alkyl; or (b) R^{3a} is H or C₁-C₁₂ alkyl, and R^{3b} together with the carbon atom to which it is bound is taken together with an adjacent R^{3b} and the carbon atom to which it is bound to form a carbon-carbon double bond;
[0493] R^{4a} and R^{4b} are, at each occurrence, independently either: (a) H or C₁-C₁₂ alkyl; or (b) R^{4a} is H or C₁-C₁₂ alkyl, and R^{4b} together with the carbon atom to which it is bound is taken together with an adjacent R^{4b} and the carbon atom to which it is bound to form a carbon-carbon double bond;
[0494] R⁵ and R⁶ are each independently H or methyl;
[0495] R⁷ is C₄-C₂₀ alkyl;
[0496] R⁸ and R⁹ are each independently C₁-C₁₂ alkyl; or R⁸ and R⁹, together with the nitrogen atom to which they are attached, form a 5, 6 or 7-membered heterocyclic ring;
[0497] a, b, c and d are each independently an integer from 1 to 24; and
[0498] x is 0, 1 or 2.

[0499] In some embodiments of Formula (II), L¹ and L² are each independently —O(C═O)—, —(C═O)O— or a direct bond. In other embodiments, G¹ and G² are each independently —(C═O)— or a direct bond. In some different embodiments, L¹ and L² are each independently —O(C═O)—, —(C═O)O— or a direct bond; and G¹ and G² are each independently —(C═O)— or a direct bond.

[0500] In some different embodiments of Formula (II), L¹ and L² are each independently —C(═O)—, —O—, —S(O)ₓ—, —S—S—, —C(═O)S—, —SC(═O)—, —NR^{a}—, —NR^{a}C(═O)—, —C(═O)NR^{a}—, —NR^{a}C(═O)NR^{a}, —OC(═O)NR^{a}—, —NR^{a}C(═O)O—, —NR^{a}S(O)ₓNR^{a}—, —NR^{a}S(O)ₓ— or —S(O)ₓNR^{a}—.

[0501] In other of the foregoing embodiments of Formula (II), the lipid compound has one of the following Formulae (IIA) or (IIB):

[chemical structure]

[0502] In some embodiments of Formula (II), the lipid compound has Formula (IIA). In other embodiments, the lipid compound has Formula (IIB).

[0503] In any of the foregoing embodiments of Formula (II), one of L¹ or L² is —O(C═O)—. For example, in some embodiments each of L¹ and L² are —O(C═O)—.

[0504] In some different embodiments of Formula (11), one of L¹ or L² is —(C═O)O—. For example, in some embodiments each of L¹ and L² is —(C═O)O—.

[0505] In different embodiments of Formula (II), one of L¹ or L² is a direct bond. As used herein, a “direct bond” means the group (e.g., L¹ or L²) is absent. For example, in some embodiments each of L¹ and L² is a direct bond.

[0506] In other different embodiments of Formula (II), for at least one occurrence of R^{1a} and R^{1b}, R^{1a} is H or C₁-C₁₂ alkyl, and R^{1b} together with the carbon atom to which it is bound is taken together with an adjacent R^{1b} and the carbon atom to which it is bound to form a carbon-carbon double bond.

[0507] In still other different embodiments of Formula (II), for at least one occurrence of R^{4a} and R^{4b}, R^{4a} is H or C₁-C₁₂ alkyl, and R^{4b} together with the carbon atom to which it is bound is taken together with an adjacent R^{4b} and the carbon atom to which it is bound to form a carbon-carbon double bond.

[0508] In more embodiments of Formula (II), for at least one occurrence of R^{2a} and R^{2b}, R^{2a} is H or C₁-C₁₂ alkyl, and R^{2b} together with the carbon atom to which it is bound is taken together with an adjacent R^{2b} and the carbon atom to which it is bound to form a carbon-carbon double bond.

[0509] In other different embodiments of Formula (II), for at least one occurrence of R^{3a} and R^{3b}, R^{3a} is H or C₁-C₁₂ alkyl, and R^{3b} together with the carbon atom to which it is bound is taken together with an adjacent R^{3b} and the carbon atom to which it is bound to form a carbon-carbon double bond.

[0510] In various other embodiments of Formula (II), the lipid compound has one of the following Formulae (TIC) or (IID):

[chemical structure]

wherein e, f, g and h are each independently an integer from 1 to 12.

[0511] In some embodiments of Formula (II), the lipid compound has Formula (IIC). In other embodiments, the lipid compound has Formula (IID).

[0512] In various embodiments of Formulae (IIC) or (IID), e, f, g and h are each independently an integer from 4 to 10.

[0513] In certain embodiments of Formula (II), a, b, c and d are each independently an integer from 2 to 12 or an integer from 4 to 12. In other embodiments, a, b, c and d are each independently an integer from 8 to 12 or 5 to 9. In some certain embodiments, a is 0. In some embodiments, a is 1. In other embodiments, a is 2. In more embodiments, a is 3. In yet other embodiments, a is 4. In some embodiments, a is 5. In other embodiments, a is 6. In more embodiments, a is 7. In yet other embodiments, a is 8. In some embodiments, a is 9. In other embodiments, a is 10. In more embodiments, a is 11. In yet other embodiments, a is 12. In some embodiments, a is 13. In other embodiments, a is 14. In more embodiments, a is 15. In yet other embodiments, a is 16.

[0514] In some embodiments of Formula (II), b is 1. In other embodiments, b is 2. In more embodiments, b is 3. In yet other embodiments, b is 4. In some embodiments, b is 5. In other embodiments, b is 6. In more embodiments, b is 7. In yet other embodiments, b is 8. In some embodiments, b is 9. In other embodiments, b is 10. In more embodiments, b is 11. In yet other embodiments, b is 12. In some embodiments, b is 13. In other embodiments, b is 14. In more embodiments, b is 15. In yet other embodiments, b is 16.

[0515] In some embodiments of Formula (II), c is 1. In other embodiments, c is 2. In more embodiments, c is 3. In yet other embodiments, c is 4. In some embodiments, c is 5. In other embodiments, c is 6. In more embodiments, c is 7. In yet other embodiments, c is 8. In some embodiments, c is 9. In other embodiments, c is 10. In more embodiments, c is 11. In yet other embodiments, c is 12. In some embodiments, c is 13. In other embodiments, c is 14. In more embodiments, c is 15. In yet other embodiments, c is 16.

[0516] In some certain embodiments of Formula (II), d is 0. In some embodiments, d is 1. In other embodiments, d is 2. In more embodiments, d is 3. In yet other embodiments, d is 4. In some embodiments, d is 5. In other embodiments, d is 6. In more embodiments, d is 7. In yet other embodiments, d is 8. In some embodiments, d is 9. In other embodiments, d is 10. In more embodiments, d is 11. In yet other embodiments, d is 12. In some embodiments, d is 13. In other embodiments, d is 14. In more embodiments, d is 15. In yet other embodiments, d is 16.

[0517] In some embodiments of Formula (II), e is 1. In other embodiments, e is 2. In more embodiments, e is 3. In yet other embodiments, e is 4. In some embodiments, e is 5. In other embodiments, e is 6. In more embodiments, e is 7. In yet other embodiments, e is 8. In some embodiments, e is 9. In other embodiments, e is 10. In more embodiments, e is 11. In yet other embodiments, e is 12.

[0518] In some embodiments of Formula (II), f is 1. In other embodiments, f is 2. In more embodiments, f is 3. In yet other embodiments, f is 4. In some embodiments, f is 5. In other embodiments, f is 6. In more embodiments, f is 7. In yet other embodiments, f is 8. In some embodiments, f is 9. In other embodiments, f is 10. In more embodiments, f is 11. In yet other embodiments, f is 12.

[0519] In some embodiments of Formula (II), g is 1. In other embodiments, g is 2. In more embodiments, g is 3. In yet other embodiments, g is 4. In some embodiments, g is 5. In other embodiments, g is 6. In more embodiments, g is 7. In yet other embodiments, g is 8. In some embodiments, g is 9. In other embodiments, g is 10. In more embodiments, g is 11. In yet other embodiments, g is 12.

[0520] In some embodiments of Formula (II), h is 1. In other embodiments, e is 2. In more embodiments, h is 3. In yet other embodiments, h is 4. In some embodiments, e is 5. In other embodiments, h is 6. In more embodiments, h is 7. In yet other embodiments, h is 8. In some embodiments, h is 9. In other embodiments, h is 10. In more embodiments, h is 11. In yet other embodiments, h is 12.

[0521] In some other various embodiments of Formula (II), a and d are the same. In some other embodiments, b and c are the same. In some other specific embodiments and a and d are the same and b and c are the same.

[0522] The sum of a and b and the sum of c and d of Formula (II) are factors which may be varied to obtain a lipid having the desired properties. In one embodiment, a and b are chosen such that their sum is an integer ranging from 14 to 24. In other embodiments, c and d are chosen such that their sum is an integer ranging from 14 to 24. In further embodiment, the sum of a and b and the sum of c and d are the same. For example, in some embodiments the sum of a and b and the sum of c and d are both the same integer which may range from 14 to 24. In still more embodiments, a, b, c and d are selected such that the sum of a and b and the sum of c and d is 12 or greater.

[0523] The substituents at R^{1a}, R^{2a}, R^{3a} and R^{4a} of Formula (II) are not particularly limited. In some embodiments, at least one of R^{1a}, R^{2a}, R^{3a} and R^{4a} is H. In certain embodiments R^{1a}, R^{2a}, R^{3a} and R^{4a} are H at each occurrence. In certain other embodiments at least one of R^{1a}, R^{2a}, R^{3a} and R^{4a} is C₁-C₁₂ alkyl. In certain other embodiments at least one of R^{1a}, R^{2a}, R^{3a} and R^{4a} is C₁-C₈ alkyl. In certain other embodiments at least one of R^{1a}, R^{2a}, R^{3a} and R^{4a} is C₁-C₆ alkyl. In some of the foregoing embodiments, the C₁-C₈ alkyl is methyl, ethyl, n-propyl, iso-propyl, n-butyl, iso-butyl, tert-butyl, n-hexyl or n-octyl.

[0524] In certain embodiments of Formula (II), R^{1a}, R^{1b}, R^{4a} and R^{4b} are C₁-C₁₂ alkyl at each occurrence.

[0525] In further embodiments of Formula (II), at least one of R^{1b}, R^{2b}, R^{3b} and R^{4b} is H or R^{1b}, R^{2b}, R^{3b} and R^{4b} are H at each occurrence.

[0526] In certain embodiments of Formula (II), R^{1b} together with the carbon atom to which it is bound is taken together with an adjacent R^{1b} and the carbon atom to which it is bound to form a carbon-carbon double bond. In other embodiments of the foregoing R^{4b} together with the carbon atom to which it is bound is taken together with an adjacent R^{4b} and the carbon atom to which it is bound to form a carbon-carbon double bond.

[0527] The substituents at R⁵ and R⁶ of Formula (II) are not particularly limited in the foregoing embodiments. In certain embodiments one of R⁵ or R⁶ is methyl. In other embodiments each of R⁵ or R⁶ is methyl.

[0528] The substituents at R⁷ of Formula (II) are not particularly limited in the foregoing embodiments. In certain embodiments R⁷ is C₆-C₁₆ alkyl. In some other embodiments, R⁷ is C₆-C₉ alkyl. In some of these embodiments, R⁷ is substituted with —(C═O)OR^{b}, —O(C═O)R^{b}, —C(═O)R^{b}, —OR^{b}, —S(O)ₓR^{b}, —S—SR^{b}, —C(═O)SR^{b}, —SC(═O)R^{b}, —NR^{a}R^{b}, —NR^{a}C(═O)R^{b}, —C(═O)NR^{a}R^{b}, —NR^{a}C(═O)NR^{a}R^{b}, —OC(═O)NR^{a}R^{b}, —NR^{a}C(═O)OR^{b}, —NR^{a}S(O)NR^{a}R^{b}, —NR^{a}S(O)ₓR^{b} or —S(O)ₓNR^{a}R^{b}, wherein: R^{a} is H or C₁-C₁₂ alkyl; R^{b} is C₁-C₁₅ alkyl; and x is 0, 1 or 2. For example, in some embodiments R⁷ is substituted with —(C═O)OR^{b} or —O(C═O)R^{b}.

[0529] In some of the foregoing embodiments of Formula (II), R^{b} is branched C₁-C₁₆ alkyl. For example, in some embodiments R^{b} has one of the following structures:

[chemical structure]

[0530] In certain other of the foregoing embodiments of Formula (II), one of R⁸ or R⁹ is methyl. In other embodiments, both R⁸ and R⁹ are methyl. In some different embodiments of Formula (II), R⁸ and R⁹, together with the nitrogen atom to which they are attached, form a 5, 6 or 7-membered heterocyclic ring. In some embodiments of the foregoing, R⁸ and R⁹, together with the nitrogen atom to which they are attached, form a 5-membered heterocyclic ring, for example a pyrrolidinyl ring. In some different embodiments of the foregoing, R⁸ and R⁹, together with the nitrogen atom to which they are attached, form a 6-membered heterocyclic ring, for example a piperazinyl ring.

[0531] In certain embodiments of Embodiment 3, the first and second cationic lipids are each, independently selected from a lipid of Formula II.

[0532] In still other embodiments of the foregoing lipids of Formula (II), G³ is C₂-C₄ alkylene, for example C₃ alkylene. In various different embodiments, the lipid compound has one of the structures set forth in Table 2 below

TABLE 2
Representative Lipids of Formula (II)

| No. | Structure | pKa |
|---|---|---|
| II-1 | [chemical structure] | 5.64 |
| II-2 | [chemical structure] | — |
| II-3 | [chemical structure] | — |
| II-4 | [chemical structure] | — |
| II-5 | [chemical structure] | 6.27 |
| II-6 | [chemical structure] | 6.14 |
| II-7 | [chemical structure] | 5.93 |
| II-8 | [chemical structure] | 5.35 |
| II-9 | [chemical structure] | 6.27 |
| II-10 | [chemical structure] | 6.16 |
| II-11 | [chemical structure] | 6.13 |
| II-12 | [chemical structure] | 6.21 |
| II-13 | [chemical structure] | 6.22 |
| II-14 | [chemical structure] | 6.33 |
| II-15 | [chemical structure] | 6.32 |
| II-16 | [chemical structure] | 6.37 |
| II-17 | [chemical structure] | 6.27 |
| II-18 | [chemical structure] | — |
| II-19 | [chemical structure] | — |
| II-20 | [chemical structure] | — |
| II-21 | [chemical structure] | — |
| II-22 | [chemical structure] | — |
| II-23 | [chemical structure] | — |
| II-24 | [chemical structure] | 6.14 |
| II-25 | [chemical structure] | — |
| II-26 | [chemical structure] | — |
| II-27 | [chemical structure] | — |
| II-28 | [chemical structure] | — |
| II-29 | [chemical structure] | — |
| II-30 | [chemical structure] | — |
| II-31 | [chemical structure] | — |
| II-32 | [chemical structure] | — |
| II-33 | [chemical structure] | — |
| II-34 | [chemical structure] | — |
| II-35 | [chemical structure] | 5.97 |
| II-36 | [chemical structure] | 6.13 |
| II-37 | [chemical structure] | 5.61 |
| II-38 | [chemical structure] | 6.45 |
| II-39 | [chemical structure] | 6.45 |
| II-40 | [chemical structure] | 6.57 |
| II-41 | [chemical structure] | — |
| II-42 | [chemical structure] | — |
| II-43 | [chemical structure] | — |
| II-44 | [chemical structure] | — |
| II-45 | [chemical structure] | — |
| II-46 | [chemical structure] | — |

[0533] In some other embodiments, the cationic lipid of Embodiments 1, 2, 3, 4 or 5 has a structure of Formula III:

[chemical structure]

or a pharmaceutically acceptable salt, prodrug or stereoisomer thereof, wherein:
[0534] one of L¹ or L² is —O(C═O)—, —(C═O)O—, —C(═O)—, —O—, —S(O)ₓ—, —S—S—, —C(═O)S—, SC(═O)—, —NR^{a}C(═O)—, —C(═O)NR^{a}—, NR^{a}C(═O)NR^{a}—, —OC(═O)NR^{a}— or —NR^{a}C(═O)O—, and the other of L¹ or L² is —O(C═O)—, —(C═O)O—, —C(═O)—, —O—, —S(O)ₓ—, —S—S—, —C(═O)S—, SC(═O)—, —NR^{a}C(═O)—, —C(═O)NR^{a}—, NR^{a}C(═O)NR^{a}—, —OC(═O)NR^{a}— or —NR^{a}C(═O)O— or a direct bond;
[0535] G¹ and G² are each independently unsubstituted C₁-C₁₂ alkylene or C₁-C₁₂ alkenylene;
[0536] G³ is C₁-C₂₄ alkylene, C₁-C₂₄ alkenylene, C₃-C₈ cycloalkylene, C₃-C₈ cycloalkenylene;
[0537] R^{a} is H or C₁-C₁₂ alkyl;
[0538] R¹ and R² are each independently C₆-C₂₄ alkyl or C₆-C₂₄ alkenyl;
[0539] R³ is H, OR⁵, CN, —C(═O)OR⁴, —OC(═O)R⁴ or —NR⁵C(═O)R⁴;
[0540] R⁴ is C₁-C₁₂ alkyl;
[0541] R⁵ is H or C₁-C₆ alkyl; and
[0542] x is 0, 1 or 2.

[0543] In some of the foregoing embodiments of Formula (III), the lipid has one of the following Formulae (IIIA) or (IIIB):

[chemical structure]

wherein:
[0544] A is a 3 to 8-membered cycloalkyl or cycloalkylene ring;
[0545] R⁶ is, at each occurrence, independently H, OH or C₁-C₂₄ alkyl;
[0546] n is an integer ranging from 1 to 15.

[0547] In some of the foregoing embodiments of Formula (III), the lipid has Formula (IIIA), and in other embodiments, the lipid has Formula (IIIB).

[0548] In other embodiments of Formula (III), the lipid has one of the following Formulae (IIIC) or (IIID):

[chemical structure]

wherein y and z are each independently integers ranging from 1 to 12.

[0549] In any of the foregoing embodiments of Formula (III), one of L¹ or L² is —O(C═O)—. For example, in some embodiments each of L¹ and L² are —O(C═O)—. In some different embodiments of any of the foregoing, L¹ and L² are each independently —(C═O)O— or —O(C═O)—. For example, in some embodiments each of L¹ and L² is —(C═O)O—.

[0550] In some different embodiments of Formula (III), the lipid has one of the following Formulae (IIIE) or (IIIF):

[chemical structure]

[0551] In some of the foregoing embodiments of Formula (III), the lipid has one of the following Formulae (IIIG), (IIIH), (IIII), or (IIIJ):

[chemical structure]

[0552] In some of the foregoing embodiments of Formula (III), n is an integer ranging from 2 to 12, for example from 2 to 8 or from 2 to 4. For example, in some embodiments, n is 3, 4, 5 or 6. In some embodiments, n is 3. In some embodiments, n is 4. In some embodiments, n is 5. In some embodiments, n is 6.

[0553] In some other of the foregoing embodiments of Formula (III), y and z are each independently an integer ranging from 2 to 10. For example, in some embodiments, y and z are each independently an integer ranging from 4 to 9 or from 4 to 6.

[0554] In some of the foregoing embodiments of Formula (III), R⁶ is H. In other of the foregoing embodiments, R⁶ is C₁-C₂₄ alkyl. In other embodiments, R⁶ is OH.

[0555] In some embodiments of Formula (III), G³ is unsubstituted. In other embodiments, G3 is substituted. In various different embodiments, G³ is linear C₁-C₂₄ alkylene or linear C₁-C₂₄ alkenylene.

[0556] In some other foregoing embodiments of Formula (III), R¹ or R², or both, is C₆-C₂₄ alkenyl. For example, in some embodiments, R¹ and R² each, independently have the following structure:

[chemical structure]

wherein:
[0557] R^{7a} and R^{7b} are, at each occurrence, independently H or C₁-C₁₂ alkyl; and
[0558] a is an integer from 2 to 12,
[0559] wherein R^{7a}, R^{7b} and a are each selected such that R¹ and R² each independently comprise from 6 to 20 carbon atoms. For example, in some embodiments a is an integer ranging from 5 to 9 or from 8 to 12.

[0560] In some of the foregoing embodiments of Formula (III), at least one occurrence of R^{7a} is H. For example, in some embodiments, R^{7a} is H at each occurrence. In other different embodiments of the foregoing, at least one occurrence of R^{7b} is C₁-C₈ alkyl. For example, in some embodiments, C₁-C₈ alkyl is methyl, ethyl, n-propyl, iso-propyl, n-butyl, iso-butyl, tert-butyl, n-hexyl or n-octyl.

[0561] In different embodiments of Formula (III), R¹ or R², or both, has one of the following structures:

[chemical structure]

[0562] In some of the foregoing embodiments of Formula (III), R³ is OH, CN, —C(═O)OR⁴, —OC(═O)R⁴ or —NHC(═O)R⁴. In some embodiments, R⁴ is methyl or ethyl.

[0563] In some specific embodiments of Embodiment 3, the first and second cationic lipids are each, independently selected from a lipid of Formula III.

[0564] In various different embodiments, a cationic lipid of any one of the disclosed embodiments (e.g., the cationic lipid, the first cationic lipid, the second cationic lipid) of Formula (III) has one of the structures set forth in Table 3 below.

TABLE 3
Representative Compounds of Formula (III)

| No. | Structure | pKa |
|---|---|---|
| III-1 | [chemical structure] | 5.89 |
| III-2 | [chemical structure] | 6.05 |
| III-3 | [chemical structure] | 6.09 |
| III-4 | [chemical structure] | 5.60 |
| III-5 | [chemical structure] | 5.59 |
| III-6 | [chemical structure] | 5.42 |
| III-7 | [chemical structure] | 6.11 |
| III-8 | [chemical structure] | 5.84 |
| III-9 | [chemical structure] | — |
| III-10 | [chemical structure] | — |
| III-11 | [chemical structure] | — |
| III-12 | [chemical structure] | — |
| III-13 | [chemical structure] | — |
| III-14 | [chemical structure] | — |
| III-15 | [chemical structure] | 6.14 |
| III-16 | [chemical structure] | 6.31 |
| III-17 | [chemical structure] | 6.28 |
| III-18 | [chemical structure] | — |
| III-19 | [chemical structure] | — |
| III-20 | [chemical structure] | 6.36 |
| III-21 | [chemical structure] | — |
| III-22 | [chemical structure] | 6.10 |
| III-23 | [chemical structure] | 5.98 |
| III-24 | [chemical structure] | — |
| III-25 | [chemical structure] | 6.22 |
| III-26 | [chemical structure] | 5.84 |
| III-27 | [chemical structure] | 5.77 |
| III-28 | [chemical structure] | — |
| III-29 | [chemical structure] | — |
| III-30 | [chemical structure] | 6.09 |
| III-31 | [chemical structure] | — |
| III-32 | [chemical structure] | — |
| III-33 | [chemical structure] | — |
| III-34 | [chemical structure] | — |
| III-35 | [chemical structure] | — |
| III-36 | [chemical structure] | — |
| III-37 | [chemical structure] | — |
| III-38 | [chemical structure] | — |
| III-39 | [chemical structure] | — |
| III-40 | [chemical structure] | — |
| III-41 | [chemical structure] | — |
| III-42 | [chemical structure] | — |
| III-43 | [chemical structure] | — |
| III-44 | [chemical structure] | — |
| III-45 | [chemical structure] | — |
| III-46 | [chemical structure] | — |
| III-47 | [chemical structure] | — |
| III-48 | [chemical structure] | — |
| III-49 | [chemical structure] | — |

[0565] In one embodiment, the cationic lipid ofany one of Embodiments 1, 2, 3, 4 or 5 has a structure of Formula (IV):

[chemical structure]

or a pharmaceutically acceptable salt, prodrug or stereoisomer thereof, wherein:
[0566] one of G¹ or G² is, at each occurrence, —O(C═O)—, —(C═O)O—, —C(═O)—, —O—, —S(O)_{y}—, —S—S—, —C(═O)S—, SC(═O)—, —N(R^{a})C(═O)—, —C(═O)N(R^{a})—, —N(R^{a})C(═O)N(R^{a})—, —OC(═O)N(R^{a})— or —N(R′)C(═O)O—, and the other of G¹ or G² is, at each occurrence, —O(C═O)—, —(C═O)O—, —C(═O)—, —O—, —S(O)_{y}—, —S—S—, —C(═O)S—, —SC(═O)—, —N(R^{a})C(═O)—, —C(═O)N(R^{a})—, —N(R^{a})C(═O)N(R^{a})—, —OC(═O)N(R^{a})— or —N(R^{a})C(═O)O— or a direct bond;
[0567] L is, at each occurrence, ˜(C═O)—, wherein ˜ represents a covalent bond to X;
[0568] X is CR^{a};
[0569] Z is alkyl, cycloalkyl or a monovalent moiety comprising at least one polar functional group when n is 1; or Z is alkylene, cycloalkylene or a polyvalent moiety comprising at least one polar functional group when n is greater than 1;
[0570] R^{a} is, at each occurrence, independently H, C₁-C₁₂ alkyl, C₁-C₁₂ hydroxylalkyl, C₁-C₁₂ aminoalkyl, C₁-C₁₂ alkylaminylalkyl, C₁-C₁₂ alkoxyalkyl, C₁-C₁₂ alkoxycarbonyl, C₁-C₁₂ alkylcarbonyloxy, C₁-C₁₂ alkylcarbonyloxyalkyl or C₁-C₁₂ alkylcarbonyl;
[0571] R is, at each occurrence, independently either: (a) H or C₁-C₁₂ alkyl; or (b) R together with the carbon atom to which it is bound is taken together with an adjacent R and the carbon atom to which it is bound to form a carbon-carbon double bond;
[0572] R¹ and R² have, at each occurrence, the following structure, respectively:

[chemical structure]

[0573] a¹ and a² are, at each occurrence, independently an integer from 3 to 12;
[0574] b¹ and b² are, at each occurrence, independently 0 or 1;
[0575] c¹ and c² are, at each occurrence, independently an integer from 5 to 10;
[0576] d¹ and d² are, at each occurrence, independently an integer from 5 to 10;
[0577] y is, at each occurrence, independently an integer from 0 to 2; and
[0578] n is an integer from 1 to 6,
[0579] wherein each alkyl, alkylene, hydroxylalkyl, aminoalkyl, alkylaminylalkyl, alkoxyalkyl, alkoxycarbonyl, alkylcarbonyloxy, alkylcarbonyloxyalkyl and alkylcarbonyl is optionally substituted with one or more substituent.

[0580] In some embodiments of Formula (TV), G¹ and G² are each independently —O(C═O)— or —(C═O)O—.

[0581] In other embodiments of Formula (IV), X is CH.

[0582] In different embodiments of Formula (IV), the sum of a¹+b¹+c¹ or the sum of a²+b²+c² is an integer from 12 to 26.

[0583] In still other embodiments of Formula (IV), a¹ and a² are independently an integer from 3 to 10. For example, in some embodiments a¹ and a² are independently an integer from 4 to 9.

[0584] In various embodiments of Formula (IV), b¹ and b² are 0. In different embodiments, b¹ and b² are 1.

[0585] In more embodiments of Formula (IV), c¹, c², d¹ and d² are independently an integer from 6 to 8.

[0586] In other embodiments of Formula (IV), c¹ and c² are, at each occurrence, independently an integer from 6 to 10, and d¹ and d² are, at each occurrence, independently an integer from 6 to 10.

[0587] In other embodiments of Formula (IV), c¹ and c² are, at each occurrence, independently an integer from 5 to 9, and d¹ and d² are, at each occurrence, independently an integer from 5 to 9.

[0588] In more embodiments of Formula (IV), Z is alkyl, cycloalkyl or a monovalent moiety comprising at least one polar functional group when n is 1. In other embodiments, Z is alkyl.

[0589] In various embodiments of the foregoing Formula (IV), R is, at each occurrence, independently either: (a) H or methyl; or (b) R together with the carbon atom to which it is bound is taken together with an adjacent R and the carbon atom to which it is bound to form a carbon-carbon double bond. In certain embodiments, each R is H. In other embodiments at least one R together with the carbon atom to which it is bound is taken together with an adjacent R and the carbon atom to which it is bound to form a carbon-carbon double bond.

[0590] In other embodiments of the compound of Formula (IV), R¹ and R² independently have one of the following structures:

[chemical structure]

[0591] In certain embodiments of Formula (IV), the compound has one of the following structures:

[chemical structure]

[chemical structure]

[chemical structure]

[chemical structure]

[0592] In still different embodiments the cationic lipid of Embodiments 1, 2, 3, 4 or 5 has the structure of Formula

[chemical structure]

or a pharmaceutically acceptable salt, prodrug or stereoisomer thereof, wherein:
[0593] one of G¹ or G² is, at each occurrence, —O(C═O)—, —(C═O)O—, —C(═O)—, —O—, —S(O)_{y}—, —S—S—, —C(═O)S—, SC(═O)—, —N(R^{a})C(═O)—, —C(═O)N(R^{a})—, —N(R^{a})C(═O)N(R^{a})—, —OC(═O)N(R^{a})— or —N(R^{a})C(═O)O—, and the other of G¹ or G² is, at each occurrence, —O(C═O)—, —(C═O)O—, —C(═O)—, —O—, —S(O)_{y}—, —S—S—, —C(═O)S—, —SC(═O)—, —N(R^{a})C(═O)—, —C(═O)N(R^{a})—, —N(R^{a})C(═O)N(R^{a})—, —OC(═O)N(R^{a})— or —N(R^{a})C(═O)O— or a direct bond;
[0594] L is, at each occurrence, ˜O(C═O)—, wherein ˜ represents a covalent bond to X;
[0595] X is CR^{a};
[0596] Z is alkyl, cycloalkyl or a monovalent moiety comprising at least one polar functional group when n is 1; or Z is alkylene, cycloalkylene or a polyvalent moiety comprising at least one polar functional group when n is greater than 1;
[0597] R^{a} is, at each occurrence, independently H, C₁-C₁₂ alkyl, C₁-C₁₂ hydroxylalkyl, C₁-C₁₂ aminoalkyl, C₁-C₁₂ alkylaminylalkyl, C₁-C₁₂ alkoxyalkyl, C₁-C₁₂ alkoxycarbonyl, C₁-C₁₂ alkylcarbonyloxy, C₁-C₁₂ alkylcarbonyloxyalkyl or C₁-C₁₂ alkylcarbonyl;
[0598] R is, at each occurrence, independently either: (a) H or C₁-C₁₂ alkyl; or (b) R together with the carbon atom to which it is bound is taken together with an adjacent R and the carbon atom to which it is bound to form a carbon-carbon double bond;
[0599] R¹ and R² have, at each occurrence, the following structure, respectively:

[chemical structure]

[0600] R′ is, at each occurrence, independently H or C₁-C₁₂ alkyl;
[0601] a¹ and a² are, at each occurrence, independently an integer from 3 to 12;
[0602] b¹ and b² are, at each occurrence, independently 0 or 1;
[0603] c¹ and c² are, at each occurrence, independently an integer from 2 to 12;
[0604] d¹ and d² are, at each occurrence, independently an integer from 2 to 12;
[0605] y is, at each occurrence, independently an integer from 0 to 2; and
[0606] n is an integer from 1 to 6,
[0607] wherein a¹, a², c¹, c², d¹ and d² are selected such that the sum of a¹+c¹+d¹ is an integer from 18 to 30, and the sum of a²+c²+d² is an integer from 18 to 30, and wherein each alkyl, alkylene, hydroxylalkyl, aminoalkyl, alkylaminylalkyl, alkoxyalkyl, alkoxycarbonyl, alkylcarbonyloxy, alkylcarbonyloxyalkyl and alkylcarbonyl is optionally substituted with one or more substituent.

[0608] In certain embodiments of Formula (V), G¹ and G² are each independently —O(C═O)— or —(C═O)O—.

[0609] In other embodiments of Formula (V), X is CH.

[0610] In some embodiments of Formula (V), the sum of a¹+c¹+d¹ is an integer from 20 to 30, and the sum of a²+c²+d² is an integer from 18 to 30. In other embodiments, the sum of a¹+c¹+d¹ is an integer from 20 to 30, and the sum of a²+c²+d² is an integer from 20 to 30. In more embodiments of Formula (V), the sum of a¹+b¹+c¹ or the sum of a²+b²+c² is an integer from 12 to 26. In other embodiments, a¹, a², c¹, c², d¹ and d² are selected such that the sum of a¹+c¹+d¹ is an integer from 18 to 28, and the sum of a²+c²+d² is an integer from 18 to 28,

[0611] In still other embodiments of Formula (V), at and a² are independently an integer from 3 to 10, for example an integer from 4 to 9.

[0612] In yet other embodiments of Formula (V), b¹ and b² are 0. In different embodiments b¹ and b² are 1.

[0613] In certain other embodiments of Formula (V), c¹, c², d¹ and d² are independently an integer from 6 to 8.

[0614] In different other embodiments of Formula (V), Z is alkyl or a monovalent moiety comprising at least one polar functional group when n is 1; or Z is alkylene or a polyvalent moiety comprising at least one polar functional group when n is greater than 1.

[0615] In more embodiments of Formula (V), Z is alkyl, cycloalkyl or a monovalent moiety comprising at least one polar functional group when n is 1. In other embodiments, Z is alkyl.

[0616] In other different embodiments of Formula (V), R is, at each occurrence, independently either: (a) H or methyl; or (b) R together with the carbon atom to which it is bound is taken together with an adjacent R and the carbon atom to which it is bound to form a carbon-carbon double bond. For example in some embodiments each R is H. In other embodiments at least one R together with the carbon atom to which it is bound is taken together with an adjacent R and the carbon atom to which it is bound to form a carbon-carbon double bond.

[0617] In more embodiments, each R′ is H.

[0618] In certain embodiments of Formula (V), the sum of a¹+c¹+d¹ is an integer from 20 to 25, and the sum of a²+c²+d² is an integer from 20 to 25.

[0619] In other embodiments of Formula (V), R¹ and R² independently have one of the following structures:

[chemical structure]

[0620] In more embodiments of Formula (V), the compound has one of the following structures:

[chemical structure]

[chemical structure]

[chemical structure]

[0621] In any of the foregoing embodiments of Formula (IV) or (V), n is 1. In other of the foregoing embodiments of Formula (IV) or (V), n is greater than 1.

[0622] In more of any of the foregoing embodiments of Formula (IV) or (V), Z is a mono- or polyvalent moiety comprising at least one polar functional group. In some embodiments, Z is a monovalent moiety comprising at least one polar functional group. In other embodiments, Z is a polyvalent moiety comprising at least one polar functional group.

[0623] In more of any of the foregoing embodiments of Formula (IV) or (V), the polar functional group is a hydroxyl, alkoxy, ester, cyano, amide, amino, alkylaminyl, heterocyclyl or heteroaryl functional group.

[0624] In any of the foregoing embodiments of Formula (IV) or (V), Z is hydroxyl, hydroxylalkyl, alkoxyalkyl, amino, aminoalkyl, alkylaminyl, alkylaminylalkyl, heterocyclyl or heterocyclylalkyl.

[0625] In some other embodiments of Formula (IV) or (V), Z has the following structure:

[chemical structure]

wherein:
[0626] R⁵ and R⁶ are independently H or C₁-C₆ alkyl;
[0627] R⁷ and R⁸ are independently H or C₁-C₆ alkyl or R⁷ and R⁸, together with the nitrogen atom to which they are attached, join to form a 3-7 membered heterocyclic ring; and
[0628] x is an integer from 0 to 6.

[0629] In still different embodiments of Formula (IV) or (V), Z has the following structure:

[chemical structure]

wherein:
[0630] R⁵ and R⁶ are independently H or C₁-C₆ alkyl;
[0631] R⁷ and R⁸ are independently H or C₁-C₆ alkyl or R⁷ and R⁸, together with the nitrogen atom to which they are attached, join to form a 3-7 membered heterocyclic ring; and
[0632] x is an integer from 0 to 6.

[0633] In still different embodiments of formula (IV) or (V), Z has the following structure:

[chemical structure]

wherein:
[0634] R⁵ and R⁶ are independently H or C₁-C₆ alkyl;
[0635] R⁷ and R⁸ are independently H or C₁-C₆ alkyl or R⁷ and R⁸, together with the nitrogen atom to which they are attached, join to form a 3-7 membered heterocyclic ring; and
[0636] x is an integer from 0 to 6.

[0637] In some other embodiments of Formula (IV) or (V), Z is hydroxylalkyl, cyanoalkyl or an alkyl substituted with one or more ester or amide groups.

[0638] For example, in any of the foregoing embodiments of Formula (IV) or (V), Z has one of the following structures:

[chemical structure]

[0639] In other embodiments of Formula (IV) or (V), Z-L has one of the following structures:

[chemical structure]

[chemical structure]

[chemical structure]

[chemical structure]

[chemical structure]

[chemical structure]

[0640] In other embodiments, Z-L has one of the following structures:

[chemical structure]

[0641] In still other embodiments, X is CH and Z-L has one of the following structures:

[chemical structure]

[0642] In various different embodiments, a cationic lipid of any one Embodiments 1, 2, 3, 4 or 5 has one of the structures set forth in Table 4 below.

TABLE 4
Representative Compounds of Formula (IV) or (V)

| No. | Structure |
|---|---|
| IV-1 | [chemical structure] |
| IV-2 | [chemical structure] |
| IV-3 | [chemical structure] |

[0643] In one embodiment, the cationic lipid is a compound having the following structure (VI):

[chemical structure]

or a pharmaceutically acceptable salt, tautomer, prodrug or stereoisomer thereof, wherein:
[0644] L¹ and L² are each independently —O(C═O)—, —(C═O)O—, —C(═O)—, —O—, —S(O)ₓ—, —S—S—, —C(═O)S—, —SC(═O)—, —NR^{a}C(═O)—, —C(═O)NR^{a}—, —NR^{a}C(═O)NR^{a}—, —OC(═O)NR^{a}—, —NR^{a}C(═O)O— or a direct bond;
[0645] G¹ is C₁-C₂ alkylene, —(C═O)—, —O(C═O)—, —SC(═O)—, —NR^{a}C(═O)— or a direct bond;
[0646] G² is —C(═O)—, —(C═O)O—, —C(═O)S—, —C(═O)NR^{a}— or a direct bond;
[0647] G3 is C₁-C₆ alkylene;
[0648] R^{a} is H or C₁-C₁₂ alkyl;
[0649] R^{1a} and R^{1b} are, at each occurrence, independently either: (a) H or C₁-C₁₂ alkyl; or (b) R^{1a} is H or C₁-C₁₂ alkyl, and R^{1b} together with the carbon atom to which it is bound is taken together with an adjacent R¹b and the carbon atom to which it is bound to form a carbon-carbon double bond;
[0650] R^{2a} and R^{2b} are, at each occurrence, independently either: (a) H or C₁-C₁₂ alkyl; or (b) R^{2a} is H or C₁-C₁₂ alkyl, and R^{2b} together with the carbon atom to which it is bound is taken together with an adjacent R^{2b} and the carbon atom to which it is bound to form a carbon-carbon double bond;
[0651] R^{3a} and R^{3b} are, at each occurrence, independently either (a): H or C₁-C₁₂ alkyl; or (b) R^{3a} is H or C₁-C₁₂ alkyl, and R^{3b} together with the carbon atom to which it is bound is taken together with an adjacent R^{3b} and the carbon atom to which it is bound to form a carbon-carbon double bond;
[0652] R^{4a} and R^{4b} are, at each occurrence, independently either: (a) H or C₁-C₁₂ alkyl; or (b) R^{4a} is H or C₁-C₁₂ alkyl, and R^{4b} together with the carbon atom to which it is bound is taken together with an adjacent R^{4b} and the carbon atom to which it is bound to form a carbon-carbon double bond;
[0653] R⁵ and R⁶ are each independently H or methyl;
[0654] R⁷ is H or C₁-C₂₀ alkyl;
[0655] R⁸ is OH, —N(R₉)(C═O)R¹⁰, —(C═O)NR⁹R¹⁰, —NR⁹R¹⁰, —(C═O)OR¹¹ or —O(C═O)R¹¹, provided that G³ is C₄-C₆ alkylene when R⁸ is —NR⁹R¹⁰,
[0656] R⁹ and R¹⁰ are each independently H or C₁-C₁₂ alkyl;
[0657] R¹ is aralkyl;
[0658] a, b, c and d are each independently an integer from 1 to 24; and
[0659] x is 0, 1 or 2,
   wherein each alkyl, alkylene and aralkyl is optionally substituted.

[0660] In some embodiments of structure (VI), L and L² are each independently —O(C═O)—, —(C═O)O— or a direct bond. In other embodiments, G¹ and G² are each independently —(C═O)— or a direct bond. In some different embodiments, L¹ and L² are each independently —O(C═O)—, —(C═O)O— or a direct bond; and G¹ and G² are each independently —(C═O)— or a direct bond.

[0661] In some different embodiments of structure (VI), L¹ and L² are each independently —C(═O)—, —O—, —S(O)ₓ—, —S—S—, —C(═O)S—, —SC(═O)—, —NR^{a}—, —NR^{a}C(═O)—, —C(═O)NR^{a}—, —NR^{a}C(═O)NR^{a}, —OC(═O)NR^{a}—, —NR^{a}C(═O)O—, —NR^{a}S(O)ₓNR^{a}—, —NR^{a}S(O)ₓ— or —S(O)ₓNR^{a}—.

[0662] In other of the foregoing embodiments of structure (VI), the compound has one of the following structures (VIA) or (VIB):

[chemical structure]

[0663] In some embodiments, the compound has structure (VIA). In other embodiments, the compound has structure (VIB).

[0664] In any of the foregoing embodiments of structure (VI), one of L¹ or L² is —O(C═O)—. For example, in some embodiments each of L¹ and L² are —O(C═O)—.

[0665] In some different embodiments of any of the foregoing, one of L¹ or L² is —(C═O)O—. For example, in some embodiments each of Lt and L² is —(C═O)O—.

[0666] In different embodiments of structure (VI), one of L¹ or L² is a direct bond. As used herein, a “direct bond” means the group (e.g., L¹ or L²) is absent. For example, in some embodiments each of L¹ and L² is a direct bond.

[0667] In other different embodiments of the foregoing, for at least one occurrence of R^{1a} and R^{1b}, R^{1a} is H or C₁-C₁₂ alkyl, and R^{1b} together with the carbon atom to which it is bound is taken together with an adjacent Rib and the carbon atom to which it is bound to form a carbon-carbon double bond.

[0668] In still other different embodiments of structure (VI), for at least one occurrence of R^{4a} and R^{4b}, R^{4a} is H or C₁-C₁₂ alkyl, and R^{4b} together with the carbon atom to which it is bound is taken together with an adjacent R^{4b} and the carbon atom to which it is bound to form a carbon-carbon double bond.

[0669] In more embodiments of structure (VI), for at least one occurrence of R^{2a} and R^{2b}, R^{2a} is H or C₁-C₁₂ alkyl, and R^{2b} together with the carbon atom to which it is bound is taken together with an adjacent R^{2b} and the carbon atom to which it is bound to form a carbon-carbon double bond.

[0670] In other different embodiments of any of the foregoing, for at least one occurrence of R^{3a} and R^{3b}, R^{3a} is H or C₁-C₁₂ alkyl, and R^{3b} together with the carbon atom to which it is bound is taken together with an adjacent R^{3b} and the carbon atom to which it is bound to form a carbon-carbon double bond.

[0671] It is understood that “carbon-carbon” double bond refers to one of the following structures:

[chemical structure]

wherein R_{c} and R^{d} are, at each occurrence, independently H or a substituent. For example, in some embodiments R^{c} and R^{d} are, at each occurrence, independently H, C₁-C₁₂ alkyl or cycloalkyl, for example H or C₁-C₁₂ alkyl.

[0672] In various other embodiments, the compound has one of the following structures (VIC) or (VID):

[chemical structure]

wherein e, f, g and h are each independently an integer from 1 to 12.

[0673] In some embodiments, the compound has structure (VIC). In other embodiments, the compound has structure (VID).

[0674] In various embodiments of the compounds of structures (VIC) or (VID), e, f, g and h are each independently an integer from 4 to 10.

[0675] In other different embodiments,

[chemical structure]

or both, independently has one of the following structures:

[chemical structure]

[0676] In certain embodiments of the foregoing, a, b, c and d are each independently an integer from 2 to 12 or an integer from 4 to 12. In other embodiments, a, b, c and d are each independently an integer from 8 to 12 or 5 to 9. In some certain embodiments, a is 0. In some embodiments, a is 1. In other embodiments, a is 2. In more embodiments, a is 3. In yet other embodiments, a is 4. In some embodiments, a is 5. In other embodiments, a is 6. In more embodiments, a is 7. In yet other embodiments, a is 8. In some embodiments, a is 9. In other embodiments, a is 10. In more embodiments, a is 11. In yet other embodiments, a is 12. In some embodiments, a is 13. In other embodiments, a is 14. In more embodiments, a is 15. In yet other embodiments, a is 16.

[0677] In some embodiments of structure (VI), b is 1. In other embodiments, b is 2. In more embodiments, b is 3. In yet other embodiments, b is 4. In some embodiments, b is 5. In other embodiments, b is 6. In more embodiments, b is 7. In yet other embodiments, b is 8. In some embodiments, b is 9. In other embodiments, b is 10. In more embodiments, b is 11. In yet other embodiments, b is 12. In some embodiments, b is 13. In other embodiments, b is 14. In more embodiments, b is 15. In yet other embodiments, b is 16.

[0678] In some embodiments of structure (VI), c is 1. In other embodiments, c is 2. In more embodiments, c is 3. In yet other embodiments, c is 4. In some embodiments, c is 5. In other embodiments, c is 6. In more embodiments, c is 7. In yet other embodiments, c is 8. In some embodiments, c is 9. In other embodiments, c is 10. In more embodiments, c is 11. In yet other embodiments, c is 12. In some embodiments, c is 13. In other embodiments, c is 14. In more embodiments, c is 15. In yet other embodiments, c is 16.

[0679] In some certain embodiments of structure (VI), d is 0. In some embodiments, d is 1. In other embodiments, d is 2. In more embodiments, d is 3. In yet other embodiments, d is 4. In some embodiments, d is 5. In other embodiments, d is 6. In more embodiments, d is 7. In yet other embodiments, d is 8. In some embodiments, d is 9. In other embodiments, d is 10. In more embodiments, d is 11. In yet other embodiments, d is 12. In some embodiments, d is 13. In other embodiments, d is 14. In more embodiments, d is 15. In yet other embodiments, d is 16. In some embodiments of structure (VI), e is 1. In other embodiments, e is 2. In more embodiments, e is 3. In yet other embodiments, e is 4. In some embodiments, e is 5. In other embodiments, e is 6. In more embodiments, e is 7. In yet other embodiments, e is 8. In some embodiments, e is 9. In other embodiments, e is 10. In more embodiments, e is 11. In yet other embodiments, e is 12. In some embodiments of structure (VI), f is 1. In other embodiments, f is 2. In more embodiments, f is 3. In yet other embodiments, f is 4. In some embodiments, f is 5. In other embodiments, f is 6. In more embodiments, f is 7. In yet other embodiments, f is 8. In some embodiments, f is 9. In other embodiments, f is 10. In more embodiments, f is 11. In yet other embodiments, f is 12.

[0680] In some embodiments of structure (VI), g is 1. In other embodiments, g is 2. In more embodiments, g is 3. In yet other embodiments, g is 4. In some embodiments, g is 5. In other embodiments, g is 6. In more embodiments, g is 7. In yet other embodiments, g is 8. In some embodiments, g is 9. In other embodiments, g is 10. In more embodiments, g is 11. In yet other embodiments, g is 12. In some embodiments of structure (VI), h is 1. In other embodiments, e is 2. In more embodiments, h is 3. In yet other embodiments, h is 4. In some embodiments, e is 5. In other embodiments, h is 6. In more embodiments, h is 7. In yet other embodiments, h is 8. In some embodiments, h is 9. In other embodiments, h is 10. In more embodiments, h is 11. In yet other embodiments, h is 12. In some other various embodiments of structure (VI), a and d are the same. In some other embodiments, b and c are the same. In some other specific embodiments a and d are the same and b and c are the same.

[0681] The sum of a and b and the sum of c and d are factors which may be varied to obtain a lipid having the desired properties. In one embodiment, a and b are chosen such that their sum is an integer ranging from 14 to 24. In other embodiments, c and d are chosen such that their sum is an integer ranging from 14 to 24. In further embodiment, the sum of a and b and the sum of c and d are the same. For example, in some embodiments the sum of a and b and the sum of c and d are both the same integer which may range from 14 to 24. In still more embodiments, a, b, c and d are selected such that the sum of a and b and the sum of c and d is 12 or greater.

[0682] The substituents at R^{1a}, R^{2a}, R^{3a} and R^{4a} are not particularly limited. In some embodiments, at least one of R^{a}, R^{2a}, R^{3a} and R^{4a} is H. In certain embodiments R^{1a}, R^{2a}, R^{3a} and R^{4a} are H at each occurrence. In certain other embodiments at least one of R^{1a}, R^{2a}, R^{3a} and R^{4a} is C₁-C₁₂ alkyl. In certain other embodiments at least one of R^{1a}, R^{2a}, R^{3a} and R^{4a} is C₁-C₈ alkyl. In certain other embodiments at least one of R^{1a}, R^{2a}, R^{3a} and R^{4a} is C₁-C₆ alkyl. In some of the foregoing embodiments, the C₁-C₈ alkyl is methyl, ethyl, n-propyl, iso-propyl, n-butyl, iso-butyl, tert-butyl, n-hexyl or n-octyl.

[0683] In certain embodiments of the foregoing, R^{1a}, R^{1b}, R^{4a} and R^{4b} are C₁-C₁₂ alkyl at each occurrence.

[0684] In further embodiments of the foregoing, at least one of R^{1b}, R^{2b}, R^{3b} and R^{4b} is H or R^{1b}, R^{2b}, R^{3b} and R^{4b} are H at each occurrence.

[0685] In certain embodiments of the foregoing, R^{1b} together with the carbon atom to which it is bound is taken together with an adjacent R^{1b} and the carbon atom to which it is bound to form a carbon-carbon double bond. In other embodiments of the foregoing R^{4b} together with the carbon atom to which it is bound is taken together with an adjacent R^{4b} and the carbon atom to which it is bound to form a carbon-carbon double bond.

[0686] The substituents at R⁵ and R⁶ are not particularly limited in the foregoing embodiments. In certain embodiments one of R⁵ or R₆ is methyl. In other embodiments each of R⁵ or R⁶ is methyl.

[0687] The substituents at R⁷ are not particularly limited in the foregoing embodiments. In certain embodiments R⁷ is C₆-C₁₆ alkyl. In some other embodiments, R⁷ is C₆-C₉ alkyl. In some of these embodiments, R⁷ is substituted with —(C═O)OR^{b}, —O(C═O)R^{b}, —C(═O)R^{b}, —OR^{b}, —S(O)ₓR^{b}, —S—SR^{b}, —C(═O)SR^{b}, —SC(═O)R^{b}, —NR^{a}R^{b}, —NR^{a}C(═O)R^{b}, —C(═O)NR^{a}R^{b}, —NR^{a}C(═O)NR^{a}R^{b}, —OC(═O)NR^{a}R^{b}, —NR^{a}C(═O)OR^{b}, —NR^{a}S(O)ₓNR^{a}R^{b}, —NR^{a}S(O)ₓR^{b} or —S(O)ₓNR^{a}R^{b}, wherein: R^{a} is H or C₁-C₁₂ alkyl; R^{b} is C₁-C₁₅ alkyl; and x is 0, 1 or 2. For example, in some embodiments R⁷ is substituted with —(C═O)OR^{b} or —O(C═O)R^{b}.

[0688] In various of the foregoing embodiments of structure (VI), R^{b} is branched C₃-C₁₅ alkyl. For example, in some embodiments R^{b} has one of the following structures:

[chemical structure]

[0689] In certain embodiments, R⁸ is OH.

[0690] In other embodiments of structure (VI), R⁸ is —N(R⁹)(C═O)R¹⁰. In some other embodiments, R⁸ is —(C═O)NR⁹R¹⁰. In still more embodiments, R⁸ is —NR⁹R¹⁰. In some of the foregoing embodiments, R⁹ and R¹⁰ are each independently H or C₁-C₈ alkyl, for example H or C₁-C₃ alkyl. In more specific of these embodiments, the C₁-C₈ alkyl or C₁-C₃ alkyl is unsubstituted or substituted with hydroxyl. In other of these embodiments, R⁹ and R¹⁰ are each methyl.

[0691] In yet more embodiments of structure (VI), R⁸ is —(C═O)OR¹¹. In some of these embodiments R¹¹ is benzyl.

[0692] In yet more specific embodiments of structure (VI), R⁸ has one of the following structures:
[0693] —OH;

[chemical structure]

[0694] In still other embodiments of the foregoing compounds, G is C₂-C₅ alkylene, for example C₂-C₄ alkylene, C₃ alkylene or C₄ alkylene. In some of these embodiments, R⁸ is OH. In other embodiments, G² is absent and R⁷ is C₁-C₂ alkylene, such as methyl.

[0695] In various different embodiments, the compound has one of the structures set forth in Table 5 below.

TABLE 5
Representative cationic lipids of structure (VI)

| No. | Structure |
|---|---|
| VI- 1 | [chemical structure] |
| VI- 2 | [chemical structure] |
| VI- 3 | [chemical structure] |
| VI- 4 | [chemical structure] |
| VI- 5 | [chemical structure] |
| VI- 6 | [chemical structure] |
| VI- 7 | [chemical structure] |
| VI- 8 | [chemical structure] |
| VI- 9 | [chemical structure] |
| VI- 10 | [chemical structure] |
| VI- 11 | [chemical structure] |
| VI- 12 | [chemical structure] |
| VI- 13 | [chemical structure] |
| VI- 14 | [chemical structure] |
| VI- 15 | [chemical structure] |
| VI- 16 | [chemical structure] |
| VI- 17 | [chemical structure] |
| VI- 18 | [chemical structure] |
| VI- 19 | [chemical structure] |
| VI- 20 | [chemical structure] |
| VI- 21 | [chemical structure] |
| VI- 22 | [chemical structure] |
| VI- 23 | [chemical structure] |
| VI- 24 | [chemical structure] |
| VI- 25 | [chemical structure] |
| VI- 26 | [chemical structure] |
| VI- 27 | [chemical structure] |
| VI- 28 | [chemical structure] |
| VI- 29 | [chemical structure] |
| VI- 30 | [chemical structure] |
| VI- 31 | [chemical structure] |
| VI- 32 | [chemical structure] |
| VI- 33 | [chemical structure] |
| VI- 34 | [chemical structure] |
| VI- 35 | [chemical structure] |
| VI- 36 | [chemical structure] |
| VI- 37 | [chemical structure] |

[0696] In one embodiment, the cationic lipid is a compound having the following structure (VII):

[chemical structure]

or a pharmaceutically acceptable salt, prodrug or stereoisomer thereof, wherein:
[0697] X and X′ are each independently N or CR;
[0698] Y and Y′ are each independently absent, —O(C═O)—, —(C═O)O— or NR, provided that:
   [0699] a) Y is absent when X is N;
   [0700] b) Y′ is absent when X′ is N;
   [0701] c) Y is —O(C═O)—, —(C═O)O— or NR when X is CR; and
   [0702] d) Y′ is —O(C═O)—, —(C═O)O— or NR when X′ is CR,
[0703] L¹ and L^{1′} are each independently —O(C═O)R¹, —(C═O)OR¹, —C(═O)R¹, —OR¹, —S(O)R¹, —S—SR¹, —C(═O)SR¹, —SC(═O)R¹, —NR^{a}C(═O)R¹, —C(═O)NR^{b}R^{c}, —NR^{a}C(═O)NR^{b}R^{c}, —OC(═O)NR^{b}R^{c} or —NR^{a}C(═O)OR¹;
[0704] L² and L^{2′} are each independently —O(C═O)R², —(C═O)OR², —C(═O)R², —OR², —S(O)_{z}R², —S—SR², —C(═O)SR², —SC(═O)R², —NR^{d}C(═O)R², —C(═O)NR^{e}R^{f}, —NR^{d}C(═O)NR^{e}R^{f}, —OC(═O)NR^{e}R^{f}; —NR^{d}C(═O)OR² or a direct bond to R²;
[0705] G¹, G^{1′}, G² and G^{2′} are each independently C₂-C₁₂ alkylene or C₂-C₁₂ alkenylene;
[0706] G³ is C₂-C₂₄ heteroalkylene or C₂-C₂₄ heteroalkenylene;
[0707] R^{a}, R^{b}, R^{d} and R^{e} are, at each occurrence, independently H, C₁-C₁₂ alkyl or C₂-C₁₂ alkenyl;
[0708] R^{c} and R^{f} are, at each occurrence, independently C₁-C₁₂ alkyl or C₂-C₁₂ alkenyl;
[0709] R is, at each occurrence, independently H or C₁-C₁₂ alkyl;
[0710] R¹ and R² are, at each occurrence, independently branched C₆-C₂₄ alkyl or branched C₆-C₂₄ alkenyl;
[0711] z is 0, 1 or 2, and
   wherein each alkyl, alkenyl, alkylene, alkenylene, heteroalkylene and heteroalkenylene is independently substituted or unsubstituted unless otherwise specified.

[0712] In other different embodiments of structure (VII):
[0713] X and X are each independently N or CR;
[0714] Y and Y′ are each independently absent or NR, provided that:
   [0715] a) Y is absent when X is N;
   [0716] b) Y′ is absent when X′ is N;
   [0717] c) Y is NR when X is CR; and
   [0718] d) Y′ is NR when X′ is CR,
[0719] L¹ and L^{1′} are each independently —O(C═O)R¹, —(C═O)OR¹, —C(═O)R¹, —OR¹, —S(O)R¹, —S—SR¹, —C(═O)SR¹, —SC(═O)R¹, —NR^{a}C(═O)R¹, —C(═O)NR^{b}R^{c}, —NR^{a}C(═O)NR^{b}R^{c}, —OC(═O)NR^{b}R^{c} or —NR^{a}C(═O)OR¹;
[0720] L² and L² are each independently —O(C═O)R², —(C═O)OR², —C(O)R², —OR², —S(O)₂R², —S—SR², —C(═O)SR², —SC(═O)R², —NR^{d}C(═O)R², —C(═O)NR^{e}R^{f}, —NR^{d}C(═O)NR^{e}R^{f}, —OC(═O)NR^{e}R^{f}; —NR^{d}C(═O)OR² or a direct bond to R²;
[0721] G¹, G^{1′}, G² and G^{2′} are each independently C₂-C₁₂ alkylene or C₂-C₁₂ alkenylene;
[0722] G³ is C₂-C₂₄ alkyleneoxide or C₂-C₂₄ alkenyleneoxide;
[0723] R^{a}, R^{b}, R^{d} and R^{e} are, at each occurrence, independently H, C₁-C₁₂ alkyl or C₂-C₁₂ alkenyl;
[0724] R^{c} and R^{f} are, at each occurrence, independently C₁-C₁₂ alkyl or C₂-C₁₂ alkenyl;
[0725] R is, at each occurrence, independently H or C₁-C₁₂ alkyl;
[0726] R¹ and R² are, at each occurrence, independently branched C₆-C₂₄ alkyl or branched C₆-C₂₄ alkenyl;
[0727] z is 0, 1 or 2, and
   wherein each alkyl, alkenyl, alkylene, alkenylene, alkyleneoxide and alkenyleneoxide is independently substituted or unsubstituted unless otherwise specified.

[0728] In some embodiments of structure (VII), G³ is C₂-C₂₄ alkyleneoxide or C₂-C₂₄ alkenyleneoxide. In certain embodiments, G³ is unsubstituted. In other embodiments, G³ is substituted, for example substituted with hydroxyl. In more specific embodiments G³ is C₂-C₁₂ alkyleneoxide, for example, in some embodiments G³ is C₃-C₇ alkyleneoxide or in other embodiments G³ is C₃-C₁₂ alkyleneoxide.

[0729] In other embodiments of structure (VII), G³ is C₂-C₂₄ alkyleneaminyl or C₂-C₂₄ alkenyleneaminyl, for example C₆-C₁₂ alkyleneaminyl. In some of these embodiments, G³ is unsubstituted. In other of these embodiments, G³ is substituted with C₁-C₆ alkyl.

[0730] In some embodiments of structure (VII), X and X′ are each N, and Y and Y′ are each absent. In other embodiments, X and X′ are each CR, and Y and Y′ are each NR. In some of these embodiments, R is H.

[0731] In certain embodiments of structure (VII), X and X′ are each CR, and Y and Y′ are each independently —O(C═O)— or —(C═O)O—.

[0732] In some of the foregoing embodiments of structure (VII), the compound has one of the following structures (VIIA), (VIIB), (VIIC), (VIID), (VIIE), (VIIF), (VIIG) or (VIIH):

[chemical structure]

wherein R^{d} is, at each occurrence, independently H or optionally substituted C₁-C₆ alkyl. For example, in some embodiments R^{d} is H. In other embodiments, R^{d} is C₁-C₆ alkyl, such as methyl. In other embodiments, R^{d} is substituted C₁-C₆ alkyl, such as C₁-C₆ alkyl substituted with —O(C═O)R, —(C═O)OR, —NRC(═O)R or —C(═O)N(R)₂, wherein R is, at each occurrence, independently H or C₁-C₁₂ alkyl.

[0733] In some of the foregoing embodiments of structure (VII), L¹ and L^{1′} are each independently —O(C═O)R¹, —(C═O)OR¹ or —C(═O)NR^{b}R^{c}, and L² and L^{2′} are each independently —O(C═O)R², —(C═O)OR² or —C(═O)NR^{e}R^{f}. For example, in some embodiments L¹ and L^{1′} are each —(C═O)OR¹, and L² and L² are each —(C═O)OR². In other embodiments L¹ and L^{1′} are each —(C═O)OR¹, and L² and L² are each —C(═O)NR^{c}R^{f}. In other embodiments L¹ and L^{1′} are each —C(═O)NR^{b}R^{c}, and L² and L² are each —C(═O)NR^{e}R^{f}.

[0734] In some embodiments of the foregoing, G¹, G^{1′}, G² and G^{2′} are each independently C₂-C₈ alkylene, for example C₄-C₈ alkylene.

[0735] In some of the foregoing embodiments of structure (VII), R¹ or R², are each, at each occurrence, independently branched C₆-C₂₄ alkyl. For example, in some embodiments, R¹ and R² at each occurrence, independently have the following structure:

[chemical structure]

wherein:
[0736] R^{7a} and R^{7b} are, at each occurrence, independently H or C₁-C₁₂ alkyl; and
[0737] a is an integer from 2 to 12,
   wherein R^{7a}, R^{7b} and a are each selected such that R¹ and R² each independently comprise from 6 to 20 carbon atoms. For example, in some embodiments a is an integer ranging from 5 to 9 or from 8 to 12.

[0738] In some of the foregoing embodiments of structure (VII), at least one occurrence of R^{7a} is H. For example, in some embodiments, R^{7a} is H at each occurrence. In other different embodiments of the foregoing, at least one occurrence of R^{7b} is C₁-C₈ alkyl. For example, in some embodiments, C₁-C₈ alkyl is methyl, ethyl, n-propyl, iso-propyl, n-butyl, iso-butyl, tert-butyl, n-hexyl or n-octyl.

[0739] In different embodiments of structure (VII), R¹ or R², or both, at each occurrence independently has one of the following structures:

[chemical structure]

[0740] In some of the foregoing embodiments of structure (VII), R^{b}, R^{c}, R^{e} and R^{f}, when present, are each independently C₃-C₁₂ alkyl. For example, in some embodiments R^{b}, R^{c}, R^{e} and R^{f}, when present, are n-hexyl and in other embodiments R^{b}, R^{c}, R^{e} and R^{f}, when present, are n-octyl.

[0741] In various different embodiments of structure (VII), the cationic lipid has one of the structures set forth in Table 6 below.

TABLE 6
Representative cationic lipids of structure (VII)

| No. | Structure |
|---|---|
| VII- 1 | [chemical structure] |
| VII- 2 | [chemical structure] |
| VII- 3 | [chemical structure] |
| VII- 4 | [chemical structure] |
| VII- 5 | [chemical structure] |
| VII- 6 | [chemical structure] |
| VII- 7 | [chemical structure] |
| VII- 8 | [chemical structure] |
| VII- 9 | [chemical structure] |
| VII- 10 | [chemical structure] |
| VII- 11 | [chemical structure] |

[0742] In one embodiment, the cationic lipid is a compound having the following structure (VIII):

[chemical structure]

or a pharmaceutically acceptable salt, prodrug or stereoisomer thereof, wherein:
[0743] X is N, and Y is absent; or X is CR, and Y is NR;
[0744] L¹ is —O(C═O)R¹, —(C═O)OR¹, —C(═O)R¹, —OR¹, —S(O)R¹, —S—SR¹, —C(═O)SR¹, —SC(═O)R¹, —NR^{a}C(═O)R¹, —C(═O)NR^{b}R^{c}, —NR^{a}C(═O)NR^{b}R^{c}, —OC(═O)NR^{b}R^{c} or —NR^{a}C(═O)OR¹;
[0745] L² is —O(C═O)R², —(C═O)OR², —C(O)R², —OR², —S(O)R², —S—SR², —C(═O)SR², —SC(═O)R², —NR^{d}C(═O)R², —C(═O)NR^{e}R^{f}, —NR^{d}C(═O)NR^{e}R^{f}, —OC(═O)NR^{e}R^{f}; —NR^{d}C(═O)OR² or a direct bond to R²;
[0746] L³ is —O(C═O)R³ or —(C═O)OR³;
[0747] G¹ and G² are each independently C₂-C₁₂ alkylene or C₂-C₁₂ alkenylene;
[0748] G³ is C₁-C₂₄ alkylene, C₂-C₂₄ alkenylene, C₁-C₂₄ heteroalkylene or C₂-C₂₄ heteroalkenylene;
[0749] R^{a}, R^{b}, R^{d} and R^{e} are each independently H or C₁-C₁₂ alkyl or C₁-C₁₂ alkenyl;
[0750] R^{c} and R^{f} are each independently C₁-C₁₂ alkyl or C₂-C₁₂ alkenyl;
[0751] each R is independently H or C₁-C₁₂ alkyl;
[0752] R¹, R² and R³ are each independently C₁-C₂₄ alkyl or C₂-C₂₄ alkenyl; and
[0753] x is 0, 1 or 2, and
[0754] wherein each alkyl, alkenyl, alkylene, alkenylene, heteroalkylene and heteroalkenylene is independently substituted or unsubstituted unless otherwise specified.

[0755] In more embodiments of structure (I):
[0756] X is N, and Y is absent, or X is CR, and Y is NR;
[0757] L¹ is —O(C═O)R¹, —(C═O)OR¹, —C(═O)R¹, —OR¹, —S(O)R¹, —S—SR¹, —C(═O)SR¹, —SC(═O)R¹, —NR^{a}C(═O)R¹, —C(═O)NR^{b}R^{c}, —NR^{a}C(═O)NR^{b}R^{c}, —OC(═O)NR^{b}R^{c} or —NR^{a}C(═O)OR¹;
[0758] L² is —O(C═O)R², —(C═O)OR², —C(═O)R², —OR², —S(O)R², —S—SR², —C(═O)SR², —SC(═O)R², —NR^{d}C(═O)R², —C(═O)NR^{e}R^{f}, —NR^{d}C(═O)NR^{e}R^{f}, —OC(═O)NR^{e}R^{f}; —NR^{d}C(═O)OR² or a direct bond to R²;
[0759] L³ is —O(C═O)R³ or —(C═O)OR³;
[0760] G¹ and G² are each independently C₂-C₁₂ alkylene or C₂-C₁₂ alkenylene;
[0761] G³ is C₁-C₂₄ alkylene, C₂-C₂₄ alkenylene, C₁-C₂₄ heteroalkylene or C₂-C₂₄ heteroalkenylene when X is CR, and Y is NR; and G³ is C₁-C₂₄ heteroalkylene or C₂-C₂₄ heteroalkenylene when X is N, and Y is absent;
[0762] R^{a}, R^{b}, R^{d} and R^{e} are each independently H or C₁-C₁₂ alkyl or C₁-C₁₂ alkenyl;
[0763] R^{c} and R^{f} are each independently C₁-C₁₂ alkyl or C₂-C₁₂ alkenyl;
[0764] each R is independently H or C₁-C₁₂ alkyl;
[0765] R¹, R² and R³ are each independently C₁-C₂₄ alkyl or C₂-C₂₄ alkenyl; and
[0766] x is 0, 1 or 2, and
[0767] wherein each alkyl, alkenyl, alkylene, alkenylene, heteroalkylene and heteroalkenylene is independently substituted or unsubstituted unless otherwise specified.

[0768] In other embodiments of structure (I):
[0769] X is N and Y is absent, or X is CR and Y is NR;
[0770] L¹ is —O(C═O)R¹, —(C═O)OR¹, —C(═O)R¹, —OR¹, —S(O)R¹, —S—SR¹, —C(═O)SR¹, —SC(═O)R¹, —NR^{a}C(═O)R¹, —C(═O)NR^{b}R^{c}, —NR^{a}C(═O)NR^{b}R^{c}, —OC(═O)NR^{b}R^{c} or —NR^{a}C(═O)OR¹;
[0771] L² is —O(C═O)R², —(C═O)OR², —C(═O)R², —OR², —S(O)R², —S—SR², —C(═O)SR², —SC(═O)R², —NR^{d}C(═O)R², —C(═O)NR^{e}R^{f}, —NR^{d}C(═O)NR^{e}R^{f}, —OC(═O)NR^{e}R^{f}; —NR^{d}C(═O)OR² or a direct bond to R²;
[0772] L³ is —O(C═O)R³ or —(C═O)OR³;
[0773] G¹ and G² are each independently C₂-C₁₂ alkylene or C₂-C₁₂ alkenylene;
[0774] G³ is C₁-C₂₄ alkylene, C₂-C₂₄ alkenylene, C₁-C₂₄ heteroalkylene or C₂-C₂₄ heteroalkenylene;
[0775] R^{a}, R^{b}, R^{d} and R^{e} are each independently H or C₁-C₁₂ alkyl or C₁-C₁₂ alkenyl;
[0776] R^{c} and R^{f} are each independently C₁-C₁₂ alkyl or C₂-C₁₂ alkenyl;
[0777] each R is independently H or C₁-C₁₂ alkyl;
[0778] R¹, R² and R³ are each independently branched C₆-C₂₄ alkyl or branched C₆-C₂₄ alkenyl, and
[0779] x is 0, 1 or 2, and
   wherein each alkyl, alkenyl, alkylene, alkenylene, heteroalkylene and heteroalkenylene is independently substituted or unsubstituted unless otherwise specified.

[0780] In certain embodiments of structure (VIII), G³ is unsubstituted. In more specific embodiments G³ is C₂-C₁₂ alkylene, for example, in some embodiments G³ is C₃-C₇ alkylene or in other embodiments G³ is C₃-C₁₂ alkylene. In some embodiments, G³ is C₂ or C₃ alkylene.

[0781] In other embodiments of structure (VIII), G³ is C₁-C₁₂ heteroalkylene, for example C₁-C₁₂ aminylalkylene.

[0782] In certain embodiments of structure (VIII), X is N and Y is absent. In other embodiments, X is CR and Y is NR, for example in some of these embodiments R is H.

[0783] In some of the foregoing embodiments of structure (VIII), the compound has one of the following structures (VIIIA), (VIIIB), (VIIIC) or (VIIID):

[chemical structure]

[0784] In some of the foregoing embodiments of structure (VIII), L¹ is —O(C═O)R¹, —(C═O)OR¹ or —C(═O)NR^{b}R^{c}, and L² is —O(C═O)R², —(C═O)OR² or —C(═O)NR^{e}R^{f}. In other specific embodiments, L¹ is —(C═O)OR¹ and L² is —(C═O)OR². Tn any of the foregoing embodiments, L³ is —(C═O)OR³.

[0785] In some of the foregoing embodiments of structure (VIII), G¹ and G² are each independently C₂-C₁₂ alkylene, for example C₄-C₁₀ alkylene.

[0786] In some of the foregoing embodiments of structure (VIII), R¹, R² and R³ are each, independently branched C₆-C₂₄ alkyl. For example, in some embodiments, R¹, R² and R³ each, independently have the following structure:

[chemical structure]

wherein:
[0787] R^{7a} and R^{7b} are, at each occurrence, independently H or C₁-C₁₂ alkyl, and
[0788] a is an integer from 2 to 12,
   wherein R^{7a}, R^{7b} and a are each selected such that R¹ and R² each independently comprise from 6 to 20 carbon atoms. For example, in some embodiments a is an integer ranging from 5 to 9 or from 8 to 12.

[0789] In some of the foregoing embodiments of structure (VIII), at least one occurrence of R^{7a} is H. For example, in some embodiments, R^{7a} is H at each occurrence. In other different embodiments of the foregoing, at least one occurrence of R^{7b} is C₁-C₈ alkyl. For example, in some embodiments, C₁-C₈ alkyl is methyl, ethyl, n-propyl, iso propyl, n-butyl, iso-butyl, tert-butyl, n-hexyl or n-octyl.

[0790] In some of the foregoing embodiments of structure (VIII), X is CR, Y is NR and R³ is C₁-C₁₂ alkyl, such as ethyl, propyl or butyl. In some of these embodiments, R¹ and R² are each independently branched C₆-C₂₄ alkyl.

[0791] In different embodiments of structure (Viii), R¹, R² and R³ each, independently have one or the following structures:

[chemical structure]

[0792] In certain embodiments of structure (VIII), R¹ and R² and R³ are each, independently, branched C₆-C₂₄ alkyl and R³ is C₁-C₂₄ alkyl or C₂-C₂₄ alkenyl.

[0793] In some of the foregoing embodiments of structure (VIII), R^{b}, R^{c}, R^{e} and R^{f} are each independently C₃-C₁₂ alkyl. For example, in some embodiments R^{b}, R^{c}, R^{e} and R^{f} are n-hexyl and in other embodiments R^{b}, R^{c}, R^{e} and R^{f} are n-octyl.

[0794] In various different embodiments of structure (VIII), the compound has one of the structures set forth in Table 7 below.

TABLE 7
Representative cationic lipids of structure (VIII)

| No. | Structure |
|---|---|
| VIII-1 | [chemical structure] |
| VIII-2 | [chemical structure] |
| VIII-3 | [chemical structure] |
| VIII-4 | [chemical structure] |
| VIII-5 | [chemical structure] |
| VIII-6 | [chemical structure] |
| VIII-7 | [chemical structure] |
| VIII-8 | [chemical structure] |
| VIII-9 | [chemical structure] |
| VIII-10 | [chemical structure] |
| VIII-11 | [chemical structure] |
| VIII-12 | [chemical structure] |

[0795] In one embodiment, the cationic lipid is a compound having the following structure (IX):

[chemical structure]

or a pharmaceutically acceptable salt, prodrug or stereoisomer thereof, wherein:
[0796] L¹ is —O(C═O)R¹, —(C═O)OR¹, —C(═O)R¹, —OR¹, —S(O)R¹, —S—SR¹, —C(═O)SR¹, —SC(═O)R¹, —NR^{a}C(═O)R¹, —C(═O)NR^{b}R^{c}, —NR^{a}C(═O)NR^{b}R^{c}, —OC(═O)NR^{b}R^{c} or —NR^{a}C(═O)OR¹.
[0797] L² is —O(C═O)R², —(C═O)OR², —C(═O)R², —OR², —S(O)R², —S—SR², —C(═O)SR², —SC(═O)R², —NR^{d}C(═O)R², —C(═O)NR^{e}R^{f}, —NR^{d}C(═O)NR^{e}R^{f}, —OC(═O)NR^{e}R^{f}, —NR^{d}C(═O)OR² or a direct bond to R²;
[0798] G¹ and G² are each independently C₂-C₁₂ alkylene or C₂-C₁₂ alkenylene;
[0799] G³ is C₁-C₂₄ alkylene, C₂-C₂₄ alkenylene, C₃-C₈ cycloalkylene or C₃-C₈ cycloalkenylene,
[0800] R^{a}, R^{b}, R^{d} and R^{e} are each independently H or C₁-C₁₂ alkyl or C₁-C₁₂ alkenyl;
[0801] R^{c} and R^{f} are each independently C₁-C₁₂ alkyl or C₂-C₁₂ alkenyl;
[0802] R¹ and R² are each independently branched C₆-C₂₄ alkyl or branched C₆-C₂₄ alkenyl;
[0803] R³ is —N(R⁴)R⁵;
[0804] R⁴ is C₁-C₁₂ alkyl;
[0805] R⁵ is substituted C₁-C₁₂ alkyl; and
[0806] x is 0, 1 or 2, and
   wherein each alkyl, alkenyl, alkylene, alkenylene, cycloalkylene, cycloalkenylene, aryl and aralkyl is independently substituted or unsubstituted unless otherwise specified.

[0807] In certain embodiments of structure (XI), G³ is unsubstituted. In more specific embodiments G³ is C₂-C₁₂ alkylene, for example, in some embodiments G³ is C₃-C₇ alkylene or in other embodiments G³ is C₃-C₁₂ alkylene. In some embodiments, G³ is C₂ or C₃ alkylene.

[0808] In some of the foregoing embodiments of structure (IX), the compound has the following structure (IX A):

[chemical structure]

wherein y and z are each independently integers ranging from 2 to 12, for example an integer from 2 to 6, from 4 to 10, or for example 4 or 5. In certain embodiments, y and z are each the same and selected from 4, 5, 6, 7, 8 and 9.

[0809] In some of the foregoing embodiments of structure (IX), L¹ is —O(C═O)R¹, —(C═O)OR¹ or —C(═O)NR^{b}R^{c}, and L² is —O(C═O)R², —(C═O)OR² or —C(═O)NR^{e}R^{f}. For example, in some embodiments L¹ and L² are —(C═O)OR¹ and —(C═O)OR², respectively. In other embodiments L¹ is —(C═O)OR¹ and L² is —C(═O)NR^{e}R^{f}. In other embodiments L¹ is —C(═O)NR^{b}R^{c} and L² is —C(═O)NR^{e}R^{f}.

[0810] In other embodiments of the foregoing, the compound has one of the structures or

[chemical structure]

[0811] In some of the foregoing embodiments, the compound has structure (IXB), in other embodiments, the compound has structure (IXC) and in still other embodiments the compound has the structure (IXD). In other embodiments, the compound has structure (IXE).

[0812] In some different embodiments of the foregoing, the compound has one of the following structures (IXF), (IXG), (IXH) or (IXJ):

[chemical structure]

wherein y and z are each independently integers ranging from 2 to 12, for example an integer from 2 to 6, for example 4.

[0813] In some of the foregoing embodiments of structure (IX), y and z are each independently an integer ranging from 2 to 10, 2 to 8, from 4 to 10 or from 4 to 7. For example, in some embodiments, y is 4, 5, 6, 7, 8, 9, 10, 11 or 12. In some embodiments, z is 4, 5, 6, 7, 8, 9, 10, 11 or 12. In some embodiments, y and z are the same, while in other embodiments y and z are different.

[0814] In some of the foregoing embodiments of structure (IX), R¹ or R², or both is branched C₆-C₂₄ alkyl. For example, in some embodiments, R¹ and R² each, independently have the following

[chemical structure]

wherein:
[0815] R^{7a} and R^{7b} are, at each occurrence, independently H or C₁-C₁₂ alkyl; and
[0816] a is an integer from 2 to 12,
   wherein R^{7a}, R^{7b} and a are each selected such that R¹ and R² each independently comprise from 6 to 20 carbon atoms. For example, in some embodiments a is an integer ranging from 5 to 9 or from 8 to 12.

[0817] In some of the foregoing embodiments of structure (IX), at least one occurrence of R^{7a} is H. For example, in some embodiments, R^{7a} is H at each occurrence. In other different embodiments of the foregoing, at least one occurrence of R^{7b} is C₁-C₈ alkyl. For example, in some embodiments, C₁-C₈ alkyl is methyl, ethyl, n-propyl, iso-propyl, n-butyl, iso-butyl, tert-butyl, n-hexyl or n-octyl.

[0818] In different embodiments of structure (IX), R¹ or R², or both, has one of the following structures:

[chemical structure]

[0819] In some of the foregoing embodiments of structure (IX), R^{b}, R^{c}, R^{e} and R^{f} are each independently C₃-C₁₂ alkyl. For example, in some embodiments R^{b}, R^{c}, R^{e} and R^{f} are n-hexyl and in other embodiments R^{b}, R^{c}, R^{e} and R^{f} are n-octyl.

[0820] In any of the foregoing embodiments of structure (IX), R⁴ is substituted 6 or unsubstituted: methyl, ethyl, propyl, n-butyl, n-hexyl, n-octyl or n-nonyl. For example, in some embodiments R⁴ is unsubstituted. In other R⁴ is substituted with one or more substituents selected from the group consisting of —OR^{g}, —NR^{g}C(═O)R^{h}, —C(═O)NR^{g}R^{h}, —C(═O)R^{h}, —OC(═O)R^{h}, —C(═O)OR^{h} and —ORⁱOH, wherein:
[0821] R^{g} is, at each occurrence independently H or C₁-C₆ alkyl;
[0822] R^{h} is at each occurrence independently C₁-C₆ alkyl; and
[0823] Rⁱ is, at each occurrence independently C₁-C₆ alkylene.

[0824] In other of the foregoing embodiments of structure (IX), R⁵ is substituted: methyl, ethyl, propyl, n-butyl, n-hexyl, n-octyl or n-nonyl. In some embodiments, R⁵ is substituted ethyl or substituted propyl. In other different embodiments, R⁵ is substituted with hydroxyl. In still more embodiments, R⁵ is substituted with one or more substituents selected from the group consisting of —OR^{g}, —NR^{g}C(═O)R^{h}, —C(═O)NR^{g}R^{h}, —C(═O)R^{h}, —OC(═O)R^{h}, —C(O)OR^{h} and —ORⁱOH, wherein:
[0825] R^{g} is, at each occurrence independently H or C₁-C₆ alkyl;
[0826] R^{h} is at each occurrence independently C₁-C₆ alkyl; and
[0827] Rⁱ is, at each occurrence independently C₁-C₆ alkylene.

[0828] In other embodiments of structure (IX), R⁴ is unsubstituted methyl, and R⁵ is substituted: methyl, ethyl, propyl, n-butyl, n-hexyl, n-octyl or n-nonyl. In some of these embodiments, R⁵ is substituted with hydroxyl.

[0829] In some other specific embodiments of structure (IX), R³ has one of the following structures:

[chemical structure]

[chemical structure]

[0830] In various different embodiments of structure (IX), the cationic lipid has one of the structures set forth in Table 8 below.

TABLE 8
Representative cationic lipids of structure (IX)

| No. | Structure |
|---|---|
| IX-1 | [chemical structure] |
| IX-2 | [chemical structure] |
| IX-3 | [chemical structure] |
| IX-4 | [chemical structure] |
| IX-5 | [chemical structure] |
| IX-6 | [chemical structure] |
| IX-7 | [chemical structure] |
| IX-8 | [chemical structure] |
| IX-9 | [chemical structure] |
| IX-10 | [chemical structure] |
| IX-11 | [chemical structure] |
| IX-12 | [chemical structure] |
| IX-13 | [chemical structure] |
| IX-14 | [chemical structure] |
| IX-15 | [chemical structure] |
| IX-16 | [chemical structure] |
| IX-17 | [chemical structure] |
| IX-18 | [chemical structure] |

[0831] In one embodiment, the cationic lipid is a compound having the following structure (X):

[chemical structure]

or a pharmaceutically acceptable salt, tautomer, prodrug or stereoisomer thereof, wherein:
[0832] G¹ is —OH, —NR³R⁴, —(C═O)NR⁵ or —NR³(C═O)R⁵;
[0833] G² is —CH₂— or —(C═O)—;
[0834] R is, at each occurrence, independently H or OH;
[0835] R¹ and R² are each independently branched, saturated or unsaturated C₁₂-C₃₆ alkyl;
[0836] R³ and R⁴ are each independently H or straight or branched, saturated or unsaturated C₁-C₆ alkyl;
[0837] R⁵ is straight or branched, saturated or unsaturated C₁-C₆ alkyl; and
[0838] n is an integer from 2 to 6.

[0839] In some embodiments, R¹ and R² are each independently branched, saturated or unsaturated C₁₂-C₃₀ alkyl, C₁₂-C₂₀ alkyl, or C₁₅-C₂₀ alkyl. In some specific embodiments, R¹ and R² are each saturated. In certain embodiments, at least one of R¹ and R² is unsaturated.

[0840] In some of the foregoing embodiments of structure (X), R¹ and R² have the following structure:

[chemical structure]

[0841] In some of the foregoing embodiments of structure (X), the compound has the following structure

[chemical structure]

wherein:
[0842] R⁶ and R⁷ are, at each occurrence, independently H or straight or branched, saturated or unsaturated C₁-C₁₄ alkyl;
[0843] a and b are each independently an integer ranging from 1 to 15,
[0844] provided that R⁶ and a, and R⁷ and b, are each independently selected such that R¹ and R², respectively, are each independently branched, saturated or unsaturated C₁₂-C₃₆ alkyl.

[0845] In some of the foregoing embodiments, the compound has the following structure (XB):

[chemical structure]

wherein:
[0846] R⁸, R⁹, R¹⁰ and R¹¹ are each independently straight or branched, saturated or unsaturated C₄-C₁₂ alkyl, provided that R⁸ and R⁹, and R¹⁰ and R¹¹, are each independently selected such that R¹ and R², respectively, are each independently branched, saturated or unsaturated C₁₂-C₃₆ alkyl. In some embodiments of (XB), R⁸, R⁹, R¹⁰ and R¹¹ are each independently straight or branched, saturated or unsaturated C₆-C₁₀ alkyl. In certain embodiments of (XB), at least one of R⁸, R⁹, R¹⁰ and R¹¹ is unsaturated. In other certain specific embodiments of (XB), each of R⁸, R⁹, R¹⁰ and R¹¹ is saturated.

[0847] In some of the foregoing embodiments, the compound has structure (XA), and in other embodiments, the compound has structure (XB).

[0848] In some of the foregoing embodiments, G¹ is —OH, and in some embodiments G¹ is —NR³R⁴. For example, in some embodiments, G¹ is —NH₂, —NHCH₃ or —N(CH₃)₂. In certain embodiments, G¹ is —(C═O)NR⁵. In certain other embodiments, G¹ is —NR³(C═O)R⁵. For example, in some embodiments G¹ is —NH(C═O)CH₃ or —NH(C═O)CH₂CH₂CH₃.

[0849] In some of the foregoing embodiments of structure (X), G² is —CH₂—. In some different embodiments, G² is —(C═O)—.

[0850] In some of the foregoing embodiments of structure (X), n is an integer ranging from 2 to 6, for example, in some embodiments n is 2, 3, 4, 5 or 6. In some embodiments, n is 2. In some embodiments, n is 3. In some embodiments, n is 4.

[0851] In certain of the foregoing embodiments of structure (X), at least one of R¹, R², R³, R⁴ and R⁵ is unsubstituted. For example, in some embodiments, R¹, R², R³, R⁴ and R⁵ are each unsubstituted. In some embodiments, R³ is substituted. In other embodiments R⁴ is substituted. In still more embodiments, R⁵ is substituted. In certain specific embodiments, each of R³ and R⁴ are substituted. In some embodiments, a substituent on R³, R⁴ or R⁵ is hydroxyl. In certain embodiments, R³ and R⁴ are each substituted with hydroxyl.

[0852] In some of the foregoing embodiments of structure (X), at least one R is OH. In other embodiments, each R is H.

[0853] In various different embodiments of structure (X), the compound has one of the structures set forth in Table 9 below.

TABLE 9
Representative cationic lipids of structure (X)

| No. | Structure |
|---|---|
| X-1 | [chemical structure] |
| X-2 | [chemical structure] |
| X-3 | [chemical structure] |
| X-4 | [chemical structure] |
| X-5 | [chemical structure] |
| X-6 | [chemical structure] |
| X-7 | [chemical structure] |
| X-8 | [chemical structure] |
| X-9 | [chemical structure] |
| X-10 | [chemical structure] |
| X-11 | [chemical structure] |
| X-12 | [chemical structure] |
| X-13 | [chemical structure] |
| X-14 | [chemical structure] |
| X-15 | [chemical structure] |
| X-16 | [chemical structure] |
| X-17 | [chemical structure] |

[0854] In any of Embodiments 1, 2, 3, 4 or 5, the LNPs further comprise a neutral lipid. In various embodiments, the molar ratio of the cationic lipid to the neutral lipid ranges from about 2:1 to about 8:1. In certain embodiments, the neutral lipid is present in any of the foregoing LNPs in a concentration ranging from 5 to 10 mol percent, from 5 to 15 mol percent, 7 to 13 mol percent, or 9 to 11 mol percent. In certain specific embodiments, the neutral lipid is present in a concentration of about 9.5, 10 or 10.5 mol percent. In some embodiments, the molar ratio of cationic lipid to the neutral lipid ranges from about 4.1:1.0 to about 4.9:1.0, from about 4.5:1.0 to about 4.8:1.0, or from about 4.7:1.0 to 4.8:1.0. In some embodiments, the molar ratio of total cationic lipid to the neutral lipid ranges from about 4.1:1.0 to about 4.9:1.0, from about 4.5:1.0 to about 4.8:1.0, or from about 4.7:1.0 to 4.8:1.0.

[0855] Exemplary neutral lipids for use in any of Embodiments 1, 2, 3, 4 or 5 include, for example, distearoylphosphatidylcholine (DSPC), dioleoylphosphatidylcholine (DOPC), dipalmitoylphosphatidylcholine (DPPC), dioleoylphosphatidylglycerol (DOPG), dipalmitoylphosphatidylglycerol (DPPG), dioleoyl-phosphatidylethanolamine (DOPE), palmitoyloleoylphosphatidylcholine (POPC), palmitoyloleoyl-phosphatidylethanolamine (POPE) and dioleoyl-phosphatidylethanolamine 4-(N-maleimidomethyl)-cyclohexane-Icarboxylate (DOPE-mal), dipalmitoyl phosphatidyl ethanolamine (DPPE), dimyristoylphosphoethanolamine (DIVIPE), distearoyl-phosphatidylethanolamine (DSPE), 16-O-monomethyl PE, 16-O-dimethyl PE, 18-1-trans PE, 1-stearioyl-2-oleoylphosphatidyethanol amine (SOPE), and 1,2-dielaidoyl-sn-glycero-3-phophoethanolamine (transDOPE). In one embodiment, the neutral lipid is 1,2-distearoyl-sn-glycero-3phosphocholine (DSPC). In some embodiments, the neutral lipid is selected from DSPC, DPPC, DMPC, DOPC, POPC, DOPE and SM. In some embodiments, the neutral lipid is DSPC.

[0856] In various embodiments of Embodiments 1, 2, 3, 4 or 5, any of the disclosed lipid nanoparticles comprise a steroid or steroid analogue. In certain embodiments, the steroid or steroid analogue is cholesterol. In some embodiments, the steroid is present in a concentration ranging from 39 to 49 molar percent, 40 to 46 molar percent, from 40 to 44 molar percent, from 40 to 42 molar percent, from 42 to 44 molar percent, or from 44 to 46 molar percent. In certain specific embodiments, the steroid is present in a concentration of 40, 41, 42, 43, 44, 45, or 46 molar percent.

[0857] In certain embodiments, the molar ratio of cationic lipid to the steroid ranges from 1.0:0.9 to 1.0:1.2, or from 1.0:1.0 to 1.0:1.2. In some of these embodiments, the molar ratio of cationic lipid to cholesterol ranges from about 5:1 to 1:1. In certain embodiments, the steroid is present in a concentration ranging from 32 to 40 mol percent of the steroid.

[0858] In certain embodiments, the molar ratio of total cationic to the steroid ranges from 1.0:0.9 to 1.0:1.2, or from 1.0:1.0 to 1.0:1.2. In some of these embodiments, the molar ratio of total cationic lipid to cholesterol ranges from about 5:1 to 1:1. In certain embodiments, the steroid is present in a concentration ranging from 32 to 40 mol percent of the steroid.

[0859] In some embodiments of Embodiments 1, 2, 3 4 or 5, the LNPs further comprise a polymer conjugated lipid. In various other embodiments of Embodiments 1, 2, 3 4 or 5, the polymer conjugated lipid is a pegylated lipid. For example, some embodiments include a pegylated diacylglycerol (PEG-DAG) such as 1-(monomethoxy-polyethyleneglycol)-2,3-dimyristoylglycerol (PEG-DMG), a pegylated phosphatidylethanoloamine (PEG-PE), a PEG succinate diacylglycerol (PEG-S-DAG) such as 4-O-(2′,3′-di(tetradecanoyloxy)propyl-1-O-(ω-methoxy(polyethoxy)ethyl)butanedioate (PEG-S-DMG), a pegylated ceramide (PEG-cer), or a PEG dialkoxypropylcarbamate such as co-methoxy(polyethoxy)ethyl-N-(2,3-di(tetradecanoxy)propyl)carbamate or 2,3-di(tetradecanoxy)propyl-N-(ω-methoxy(polyethoxy)ethyl)carbamate.

[0860] In various embodiments, the polymer conjugated lipid is present in a concentration ranging from 1.0 to 2.5 molar percent. In certain specific embodiments, the polymer conjugated lipid is present in a concentration of about 1.7 molar percent. In some embodiments, the polymer conjugated lipid is present in a concentration of about 1.5 molar percent.

[0861] In certain embodiments, the molar ratio of cationic lipid to the polymer conjugated lipid ranges from about 35:1 to about 25:1. In some embodiments, the molar ratio of cationic lipid to polymer conjugated lipid ranges from about 100:1 to about 20:1.

[0862] In certain embodiments, the molar ratio of total cationic lipid (i.e., the sum of the first and second cationic lipid) to the polymer conjugated lipid ranges from about 35:1 to about 25:1. In some embodiments, the molar ratio of total cationic lipid to polymer conjugated lipid ranges from about 100:1 to about 20:1.

[0863] In some embodiments of Embodiments 1, 2, 3 4 or 5, the pegylated lipid, when present, has the following Formula (XI):

[chemical structure]

or a pharmaceutically acceptable salt, tautomer or stereoisomer thereof, wherein:
[0864] R¹² and R¹³ are each independently a straight or branched, saturated or unsaturated alkyl chain containing from 10 to 30 carbon atoms, wherein the alkyl chain is optionally interrupted by one or more ester bonds; and
[0865] w has a mean value ranging from 30 to 60.

[0866] In some embodiments, R¹² and R¹³ are each independently straight, saturated alkyl chains containing from 12 to 16 carbon atoms. In other embodiments, the average w ranges from 42 to 55, for example, the average w is 42, 43, 44, 45, 46, 47, 48, 49, 50, 51, 52, 53, 54 or 55. In some specific embodiments, the average w is about 49.

[0867] In some embodiments, the pegylated lipid has the following Formula (XIa):

[chemical structure]

wherein the average w is about 49.

[0868] In some embodiments of Embodiments 1, 2, 3 4 or 5, the nucleic acid is selected from antisense and messenger RNA. For example, messenger RNA may be used to induce an immune response (e.g., as a vaccine), for example by translation of immunogenic proteins.

[0869] In other embodiments of Embodiments 1, 2, 3 4 or 5, the nucleic acid is mRNA, and the mRNA to lipid ratio in the LNP (i.e., N/P, were N represents the moles of cationic lipid and P represents the moles of phosphate present as part of the nucleic

[0870] In an embodiment, the transfer vehicle comprises a lipid or an ionizable lipid described in US patent publication number 20190314524.

[0871] Some embodiments of the present invention provide nucleic acid-lipid nanoparticle compositions comprising one or more of the novel cationic lipids described herein as structures listed in Table 10, that provide increased activity of the nucleic acid and improved tolerability of the compositions in vivo.

[0872] In one embodiment, an ionizable lipid has the following structure (XII):

[chemical structure]

or a pharmaceutically acceptable salt, tautomer, prodrug or stereoisomer thereof, wherein:
[0873] one of L¹ or L² is —O(C═O)—, —(C═O)O—, —C(═O)—, —O—, —S(O)ₓ—, —S—S—, —C(═O)S—, SC(═O)— —NR^{a}C(═O)— —C(═O)NR^{a}—, NR^{a}C(═)NR^{a}—, —OC(═O)NR^{a}— or —NR^{a}C(═O)O—, and the other of L¹ or L² is —O(C═O)—, —(C═O)—, —C(═O)—, —O—, —S(O)ₓ—, —S—S—, —C(═O)S—, SC(═O)— —NR^{a}C(═O)—, —C(═O)NR^{a}—, NR^{a}C(═O)NR^{a}—, —OC(═O)NR^{a}— or —NR^{a}C(═O)O— or a direct bond;
[0874] G¹ and G² are each independently unsubstituted C₁-C₁₂ alkylene or C₁-C₁₂ alkenylene;
[0875] G³ is C₁-C₂₄ alkylene, C₁-C₂₄ alkenylene, C₃-C₈ cycloalkylene, C₃-C₈ cycloalkenylene;
[0876] R^{a} is H or C₁-C₁₂ alkyl;
[0877] R¹ and R² are each independently C₆-C₂₄ alkyl or C₆-C₂₄ alkenyl;
[0878] R³ is H, OR⁵, CN, —C(═O)OR⁴, —OC(═O)R⁴ or —NR⁵C(═O)R⁴;
[0879] R⁴ is C₁-C₁₂ alkyl;
[0880] R⁵ is H or C₁-C₆ alkyl; and
[0881] x is 0, 1 or 2.

[0882] In some embodiments, an ionizable lipid has one of the following structures (XIIA) or (XIIB):

[chemical structure]

wherein:
[0883] A is a 3 to 8-membered cycloalkyl or cycloalkylene ring;
[0884] R₆ is, at each occurrence, independently H, OH or C₁-C₂₄ alkyl; and
[0885] n is an integer ranging from 1 to 15.

[0886] In some embodiments, the ionizable lipid has structure (XIIA), and in other embodiments, the ionizable lipid has structure (XIIB).

[0887] In other embodiments, an ionizable lipid has one of the following structures (XIIC) or (XIID):

[chemical structure]

wherein y and z are each independently integers ranging from 1 to 12.

[0888] In some embodiments, one of L¹ or L² is —O(C═O)—. For example, in some embodiments each of L¹ and L² are —O(C═O)—. In some different embodiments of any of the foregoing, L¹ and L² are each independently —(C═O)O— or —O(C═O)—. For example, in some embodiments each of L¹ and L² is —(C═O)—.

[0889] In some embodiments, an ionizable lipid has one of the following structures (XIIE) or (XIIF):

[chemical structure]

[0890] In some embodiments, an ionizable lipid has one of the following structures (XIIG), (XIIH), (XIII), or (XIIJ):

[chemical structure]

[0891] In some embodiments, n is an integer ranging from 2 to 12, for example from 2 to 8 or from 2 to 4. For example, in some embodiments, n is 3, 4, 5 or 6. In some embodiments, n is 3. In some embodiments, n is 4. In some embodiments, n is 5. In some embodiments, n is 6.

[0892] In some embodiments, y and z are each independently an integer ranging from 2 to 10. For example, in some embodiments, y and z are each independently an integer ranging from 4 to 9 or from 4 to 6.

[0893] In some embodiments, R₆ is H. In other embodiments, R₆ is C₁-C₂₄ alkyl. In other embodiments, R₆ is OH.

[0894] In some embodiments, G³ is unsubstituted. In other embodiments, G3 is substituted. In various different embodiments, G³ is linear C₁-C₂₄ alkylene or linear C₁-C₂₄ alkenylene.

[0895] In some embodiments, R¹ or R², or both, is C₆-C₂₄ alkenyl. For example, in some embodiments, R¹ and R² each, independently have the following structure:

[chemical structure]

wherein:
[0896] R^{7a} and R^{7b} are, at each occurrence, independently H or C₁-C₁₂ alkyl; and
[0897] a is an integer from 2 to 12,
[0898] wherein R^{7a}, R^{7b} and a are each selected such that R¹ and R² each independently comprise from 6 to 20 carbon atoms.

[0899] In some embodiments, a is an integer ranging from 5 to 9 or from 8 to 12.

[0900] In some embodiments, at least one occurrence of R^{7a} is H. For example, in some embodiments, R^{7a} is H at each occurrence. In other different embodiments, at least one occurrence of R^{7b} is C₁-C₈ alkyl. For example, in some embodiments, C₁-C₈ alkyl is methyl, ethyl, n-propyl, iso-propyl, n-butyl, iso-butyl, tert-butyl, n-hexyl or n-octyl.

[0901] In different embodiments, R¹ or R², or both, has one of the following structures:

[chemical structure]

[0902] In some embodiments, R₃ is —OH, —CN, —C(═O)OR⁴, —OC(═O)R⁴ or —NHC(═O)R⁴. In some embodiments, R⁴ is methyl or ethyl.

[0903] In some embodiments, an ionizable lipid is a compound of Formula (1):

[chemical structure]

wherein:
[0904] each n is independently 1, 2, 3, 4, 5, 6, 7, 8, 9, 10, 11, 12, 13, 14, or 15; and
[0905] L₁ and L₃ are each independently —OC(O)—* or —C(O)O—*, wherein “*” indicates the attachment point to R₁ or R₃;
[0906] R₁ and R₃ are each independently a linear or branched C₉-C₂₀ alkyl or C₉-C₂₀ alkenyl, optionally substituted by one or more substituents selected from oxo, halo, hydroxy, cyano, alkyl, alkenyl, aldehyde, heterocyclylalkyl, hydroxyalkyl, dihydroxyalkyl, hydroxyalkylaminoalkyl, aminoalkyl, alkylaminoalkyl, dialkylaminoalkyl, (heterocyclyl)(alkyl)aminoalkyl, heterocyclyl, heteroaryl, alkylheteroaryl, alkynyl, alkoxy, amino, dialkylamino, aminoalkylcarbonylamino, aminocarbonylalkylamino, (aminocarbonylalkyl)(alkyl)amino, alkenylcarbonylamino, hydroxycarbonyl, alkyloxycarbonyl, aminocarbonyl, aminoalkylaminocarbonyl, alkylaminoalkylaminocarbonyl, dialkylaminoalkylaminocarbonyl, heterocyclylalkylaminocarbonyl, (alkylaminoalkyl)(alkyl)aminocarbonyl, alkylaminoalkylcarbonyl, dialkylaminoalkylcarbonyl, heterocyclylcarbonyl, alkenylcarbonyl, alkynylcarbonyl, alkylsulfoxide, alkylsulfoxidealkyl, alkylsulfonyl, and alkylsulfonealkyl.

[0907] In some embodiments, R₁ and R₃ are the same. In some embodiments, R₁ and R₃ are different.

[0908] In some embodiments, R₁ and R₃ are each independently a branched saturated C₉-C₂₀ alkyl. In some embodiments, one of R₁ and R₃ is a branched saturated C₉-C₂₀ alkyl, and the other is an unbranched saturated C₉-C₂₀ alkyl. In some embodiments, R₁ and R₃ are each independently selected from a group consisting of

[chemical structure]

[0909] In various embodiments, R₂ is selected from a group consisting of:

[chemical structure]

[chemical structure]

[0910] In some embodiments, R₂ may be as described in International Pat. Pub. No. WO2019/152848 A1, which is incorporated herein by reference in its entirety.

[0911] In some embodiments, an ionizable lipid is a compound of Formula (1-1) or Formula (1-2):

[chemical structure]

wherein n, R₁, R₂, and R₃ are as defined in Formula (1).

[0912] Preparation methods for the above compounds and compositions are described herein below and/or known in the art.

[0913] It will be appreciated by those skilled in the art that in the process described herein the functional groups of intermediate compounds may need to be protected by suitable protecting groups. Such functional groups include, e.g., hydroxyl, amino, mercapto, and carboxylic acid. Suitable protecting groups for hydroxyl include, e.g., trialkylsilyl or diarylalkylsilyl (for example, t-butyldimethylsilyl, t-butyldiphenylsilyl or trimethylsilyl), tetrahydropyranyl, benzyl, and the like. Suitable protecting groups for amino, amidino, and guanidino include, e.g., t-butoxycarbonyl, benzyloxycarbonyl, and the like. Suitable protecting groups for mercapto include, e.g., —C(O)—R″ (where R″ is alkyl, aryl, or arylalkyl), p-methoxybenzyl, trityl, and the like. Suitable protecting groups for carboxylic acid include, e.g., alkyl, aryl, or arylalkyl esters. Protecting groups may be added or removed in accordance with standard techniques, which are known to one skilled in the art and as described herein. The use of protecting groups is described in detail in, e.g., Green, T. W. and P. G. M. Wutz, Protective Groups in Organic Synthesis (1999), 3rd Ed., Wiley. As one of skill in the art would appreciate, the protecting group may also be a polymer resin such as a Wang resin, Rink resin, or a 2-chlorotrityl-chloride resin.

[0914] It will also be appreciated by those skilled in the art, although such protected derivatives of compounds of this invention may not possess pharmacological activity as such, they may be administered to a mammal and thereafter metabolized in the body to form compounds of the invention which are pharmacologically active. Such derivatives may therefore be described as prodrugs. All prodrugs of compounds of this invention are included within the scope of the invention.

[0915] Furthermore, all compounds of the invention which exist in free base or acid form can be converted to their pharmaceutically acceptable salts by treatment with the appropriate inorganic or organic base or acid by methods known to one skilled in the art. Salts of the compounds of the invention can also be converted to their free base or acid form by standard techniques.

[0916] The following reaction scheme illustrates an exemplary method to make compounds of Formula (1):

[chemical structure]

A1 are purchased or prepared according to methods known in the art. Reaction of A1 with diol A2 under appropriate condensation conditions (e.g., DCC) yields ester/alcohol A3, which can then be oxidized (e.g., with PCC) to aldehyde A4. Reaction of A4 with amine A5 under reductive amination conditions yields a compound of Formula (1).

[0917] The following reaction scheme illustrates a second exemplary method to make compounds of Formula (1), wherein R₁ and R₃ are the same:

[chemical structure]

[0918] Modifications to the above reaction scheme, such as using protecting groups, may yield compounds wherein R₁ and R₃ are different. The use of protecting groups, as well as other modification methods, to the above reaction scheme will be readily apparent to one of ordinary skill in the art.

[0919] It is understood that one skilled in the art may be able to make these compounds by similar methods or by combining other methods known to one skilled in the art. It is also understood that one skilled in the art would be able to make other compounds of Formula (1) not specifically illustrated herein by using the appropriate starting materials and modifying the parameters of the synthesis. In general, starting materials may be obtained from sources such as Sigma Aldrich, Lancaster Synthesis, Inc., Maybridge, Matrix Scientific, TCI, and Fluorochem USA, etc. or synthesized according to sources known to those skilled in the art (see, e.g., Advanced Organic Chemistry: Reactions, Mechanisms, and Structure, 5th edition (Wiley, December 2000)) or prepared as described in this invention.

[0920] In some embodiments, an ionizable lipid is a compound of Formula (2):

[chemical structure]

wherein each n is independently 1, 2, 3, 4, 5, 6, 7, 8, 9, 10, 11, 12, 13, 14, or 15.

[0921] In some embodiments, as used in Formula (2), R₁ and R₂ are as defined in Formula (1).

[0922] In some embodiments, as used in Formula (2), R₁ and R₂ are each independently selected from a group consisting of:

[chemical structure]

[chemical structure]

[chemical structure]

[0923] In some embodiments, R₁ and/or R₂ as used in Formula (2) may be as described in International Pat. Pub. No. WO2015/095340 A1, which is incorporated herein by reference in its entirety. In some embodiments, R₁ as used in Formula (2) may be as described in International Pat. Pub. No. WO2019/152557 A1, which is incorporated herein by reference in its entirety.

[0924] In some embodiments, as used in Formula (2), R₃ is selected from a group consisting of

[chemical structure]

[0925] In some embodiments, an ionizable lipid is a compound of Formula (3)

[chemical structure]

wherein X is selected from —O—, —S—, or —OC(O)—*, wherein * indicates the attachment point to R₁.

[0926] In some embodiments, an ionizable lipid is a compound of Formula (3-1):

[chemical structure]

[0927] In some embodiments, an ionizable lipid is a compound of Formula (3-2):

[chemical structure]

[0928] In some embodiments an ionizable lipid is a compound of Formula (3-3):

[chemical structure]

[0929] In some embodiments, as used in Formula (3-1), (3-2), or (3-3), each R₁ is independently a branched saturated C₉-C₂₀ alkyl. In some embodiments, each R₁ is independently selected from a group consisting of:

[chemical structure]

[0930] In some embodiments, each R₁ in Formula (3-1), (3-2), or (3-3) are the same.

[0931] In some embodiments, as used in Formula (3-1), (3-2), or (3-3), R₂ is selected from a group consisting of:

[chemical structure]

[chemical structure]

[0932] In some embodiments, R₂ as used in Formula (3-1), (3-2), or (3-3) may be as described in International Pat. Pub. No. WO2019/152848A1, which is incorporated herein by reference in its entirety.

[0933] In some embodiments, an ionizable lipid is a compound of Formula (5):

[chemical structure]

wherein:
[0934] each n is independently 1, 2, 3, 4, 5, 6, 7, 8, 9, 10, 11, 12, 13, 14, or 15; and
[0935] R₂ is as defined in Formula (1).

[0936] In some embodiments, as used in Formula (5), R₄ and R₅ are defined as R₁ and R₃, respectively, in Formula (1). In some embodiments, as used in Formula (5), R₄ and R may be as described in International Pat. Pub. No. WO2019/191780 A1, which is incorporated herein by reference in its entirety.

[0937] In some embodiments, an ionizable lipid of the disclosure is selected from Table 10a. In some embodiments, the ionizable lipid is Lipid 26 in Table 10a. In some embodiments, the ionizable lipid is Lipid 27 in Table 10a. In some embodiments, the ionizable lipid is Lipid 53 in Table 10a. In some embodiments, the ionizable lipid is Lipid 54 in Table 10a.

[0938] In some embodiments, an ionizable lipid of the disclosure is selected from the group consisting of:

[chemical structure]

TABLE 10a

| Ionizable | |
|---|---|
| lipid | |
| number | Structure |
| 1 | [chemical structure] |
| 2 | [chemical structure] |
| 3 | [chemical structure] |
| 4 | [chemical structure] |
| 5 | [chemical structure] |
| 6 | [chemical structure] |
| 7 | [chemical structure] |
| 8 | [chemical structure] |
| 9 | [chemical structure] |
| 10 | [chemical structure] |
| 11 | [chemical structure] |
| 12 | [chemical structure] |
| 13 | [chemical structure] |
| 14 | [chemical structure] |
| 15 | [chemical structure] |
| 16 | [chemical structure] |
| 17 | [chemical structure] |
| 18 | [chemical structure] |
| 19 | [chemical structure] |
| 20 | [chemical structure] |
| 21 | [chemical structure] |
| 22 | [chemical structure] |
| 23 | [chemical structure] |
| 24 | [chemical structure] |
| 25 | [chemical structure] |
| 26 | [chemical structure] |
| 27 | [chemical structure] |
| 28 | [chemical structure] |
| 29 | [chemical structure] |
| 30 | [chemical structure] |
| 31 | [chemical structure] |
| 32 | [chemical structure] |
| 33 | [chemical structure] |
| 34 | [chemical structure] |
| 35 | [chemical structure] |
| 36 | [chemical structure] |
| 37 | [chemical structure] |
| 38 | [chemical structure] |
| 39 | [chemical structure] |
| 40 | [chemical structure] |
| 41 | [chemical structure] |
| 42 | [chemical structure] |
| 43 | [chemical structure] |
| 44 | [chemical structure] |
| 45 | [chemical structure] |
| 46 | [chemical structure] |
| 47 | [chemical structure] |
| 48 | [chemical structure] |
| 49 | [chemical structure] |
| 50 | [chemical structure] |
| 51 | [chemical structure] |
| 52 | [chemical structure] |
| 53 | [chemical structure] |
| 54 | [chemical structure] |
| 55 | [chemical structure] |
| 56 | [chemical structure] |
| 57 | [chemical structure] |
| 58 | [chemical structure] |
| 59 | [chemical structure] |
| 60 | [chemical structure] |
| 61 | [chemical structure] |
| 62 | [chemical structure] |
| 63 | [chemical structure] |
| 64 | [chemical structure] |
| 65 | [chemical structure] |
| 66 | [chemical structure] |
| 67 | [chemical structure] |
| 68 | [chemical structure] |
| 69 | [chemical structure] |
| 70 | [chemical structure] |
| 71 | [chemical structure] |
| 72 | [chemical structure] |
| 73 | [chemical structure] |
| 74 | [chemical structure] |
| 75 | [chemical structure] |
| 76 | [chemical structure] |
| 77 | [chemical structure] |
| 78 | [chemical structure] |
| 79 | [chemical structure] |
| 80 | [chemical structure] |
| 81 | [chemical structure] |
| 82 | [chemical structure] |
| 83 | [chemical structure] |
| 84 | [chemical structure] |
| 85 | [chemical structure] |
| 86 | [chemical structure] |
| 87 | [chemical structure] |
| 88 | [chemical structure] |
| 89 | [chemical structure] |
| 90 | [chemical structure] |
| 91 | [chemical structure] |
| 92 | [chemical structure] |
| 93 | [chemical structure] |
| 94 | [chemical structure] |
| 95 | [chemical structure] |
| 96 | [chemical structure] |
| 97 | [chemical structure] |
| 98 | [chemical structure] |
| 99 | [chemical structure] |
| 100 | [chemical structure] |
| 101 | [chemical structure] |
| 102 | [chemical structure] |
| 103 | [chemical structure] |
| 104 | [chemical structure] |
| 105 | [chemical structure] |
| 106 | [chemical structure] |
| 107 | [chemical structure] |
| 108 | [chemical structure] |
| 109 | [chemical structure] |
| 110 | [chemical structure] |
| 111 | [chemical structure] |
| 112 | [chemical structure] |
| 113 | [chemical structure] |
| 114 | [chemical structure] |
| 115 | [chemical structure] |
| 116 | [chemical structure] |
| 117 | [chemical structure] |
| 118 | [chemical structure] |
| 119 | [chemical structure] |
| 120 | [chemical structure] |
| 121 | [chemical structure] |
| 122 | [chemical structure] |
| 123 | [chemical structure] |
| 124 | [chemical structure] |
| 125 | [chemical structure] |
| 126 | [chemical structure] |
| 127 | [chemical structure] |
| 128 | [chemical structure] |
| 129 | [chemical structure] |
| 130 | [chemical structure] |
| 131 | [chemical structure] |
| 132 | [chemical structure] |
| 133 | [chemical structure] |
| 134 | [chemical structure] |
| 135 | [chemical structure] |
| 136 | [chemical structure] |

[0939] In some embodiments, the ionizable lipid has a beta-hydroxyl amine head group. In some embodiments, the ionizable lipid has a gamma-hydroxyl amine head group.

[0940] In some embodiments, an ionizable lipid of the disclosure is a lipid selected from Table 10b. In some embodiments, an ionizable lipid of the disclosure is Lipid 15 from Table 10b. In an embodiment, the ionizable lipid is described in US patent publication number US20170210697A1. In an embodiment, the ionizable lipid is described in US patent publication number US20170119904A1.

TABLE 10b

| Ionizable | |
|---|---|
| lipid number | Structure |
| 1 | [chemical structure] |
| 2 | [chemical structure] |
| 3 | [chemical structure] |
| 4 | [chemical structure] |
| 5 | [chemical structure] |
| 6 | [chemical structure] |
| 7 | [chemical structure] |
| 8 | [chemical structure] |
| 9 | [chemical structure] |
| 10 | [chemical structure] |
| 11 | [chemical structure] |
| 12 | [chemical structure] |
| 13 | [chemical structure] |
| 14 | [chemical structure] |
| 15 | [chemical structure] |
| 16 | [chemical structure] |
| 17 | [chemical structure] |
| 18 | [chemical structure] |
| 19 | [chemical structure] |
| 20 | [chemical structure] |
| 21 | [chemical structure] |
| 22 | [chemical structure] |
| 23 | [chemical structure] |
| 24 | [chemical structure] |
| 25 | [chemical structure] |
| 26 | [chemical structure] |
| 27 | [chemical structure] |
| 28 | [chemical structure] |
| 29 | [chemical structure] |
| 30 | [chemical structure] |
| 31 | [chemical structure] |
| 32 | [chemical structure] |
| 33 | [chemical structure] |
| 34 | [chemical structure] |
| 35 | [chemical structure] |
| 36 | [chemical structure] |
| 37 | [chemical structure] |
| 38 | [chemical structure] |

[0941] In some embodiments, an ionizable lipid has one of the structures set forth in Table 10 below.

TABLE 10

| Number | Structure |
|---|---|
| 1 | [chemical structure] |
| 2 | [chemical structure] |
| 3 | [chemical structure] |
| 4 | [chemical structure] |
| 5 | [chemical structure] |
| 6 | [chemical structure] |
| 7 | [chemical structure] |
| 8 | [chemical structure] |
| 9 | [chemical structure] |
| 10 | [chemical structure] |
| 11 | [chemical structure] |
| 12 | [chemical structure] |
| 13 | [chemical structure] |
| 14 | [chemical structure] |
| 15 | [chemical structure] |
| 16 | [chemical structure] |
| 17 | [chemical structure] |
| 18 | [chemical structure] |
| 19 | [chemical structure] |
| 20 | [chemical structure] |
| 21 | [chemical structure] |
| 22 | [chemical structure] |
| 23 | [chemical structure] |
| 24 | [chemical structure] |
| 25 | [chemical structure] |
| 26 | [chemical structure] |
| 27 | [chemical structure] |
| 28 | [chemical structure] |
| 29 | [chemical structure] |
| 30 | [chemical structure] |
| 31 | [chemical structure] |
| 32 | [chemical structure] |
| 33 | [chemical structure] |
| 34 | [chemical structure] |
| 35 | [chemical structure] |
| 36 | [chemical structure] |
| 37 | [chemical structure] |
| 38 | [chemical structure] |
| 39 | [chemical structure] |
| 40 | [chemical structure] |
| 41 | [chemical structure] |
| 42 | [chemical structure] |
| 43 | [chemical structure] |
| 44 | [chemical structure] |
| 45 | [chemical structure] |
| 46 | [chemical structure] |
| 47 | [chemical structure] |
| 48 | [chemical structure] |
| 49 | [chemical structure] |

[0942] In some embodiments, the ionizable lipid has one of the structures set forth in Table 11 below. In some embodiments, the ionizable lipid as set forth in Table 11 is as described in international patent application PCT/US2010/061058.

TABLE 11

[chemical structure]

[chemical structure]

[chemical structure]

[chemical structure]

[chemical structure]

[chemical structure]

[chemical structure]

[chemical structure]

[chemical structure]

[chemical structure]

[chemical structure]

[chemical structure]

[chemical structure]

[chemical structure]

[chemical structure]

[chemical structure]

[chemical structure]

[chemical structure]

[chemical structure]

[chemical structure]

[chemical structure]

[chemical structure]

[chemical structure]

[chemical structure]

[chemical structure]

[chemical structure]

[chemical structure]

[chemical structure]

[chemical structure]

[chemical structure]

[chemical structure]

[chemical structure]

[chemical structure]

[chemical structure]

[chemical structure]

[chemical structure]

[chemical structure]

[chemical structure]

[chemical structure]

[chemical structure]

[chemical structure]

[chemical structure]

[chemical structure]

[chemical structure]

[chemical structure]

[chemical structure]

[chemical structure]

[chemical structure]

[chemical structure]

[chemical structure]

[chemical structure]

[chemical structure]

[chemical structure]

[chemical structure]

[chemical structure]

[chemical structure]

[chemical structure]

[chemical structure]

[chemical structure]

[chemical structure]

[chemical structure]

[chemical structure]

[chemical structure]

[chemical structure]

[chemical structure]

[chemical structure]

[chemical structure]

[chemical structure]

[chemical structure]

[chemical structure]

[chemical structure]

[chemical structure]

[chemical structure]

[chemical structure]

[chemical structure]

[chemical structure]

[chemical structure]

[chemical structure]

[chemical structure]

[chemical structure]

[chemical structure]

[chemical structure]

[chemical structure]

[chemical structure]

[chemical structure]

[chemical structure]

[chemical structure]

[chemical structure]

[chemical structure]

[chemical structure]

[chemical structure]

[chemical structure]

[chemical structure]

[chemical structure]

[chemical structure]

[chemical structure]

[chemical structure]

[chemical structure]

[chemical structure]

[chemical structure]

[chemical structure]

[chemical structure]

[chemical structure]

[chemical structure]

[chemical structure]

[chemical structure]

[chemical structure]

[chemical structure]

[chemical structure]

[chemical structure]

[chemical structure]

[chemical structure]

[chemical structure]

[chemical structure]

[chemical structure]

[chemical structure]

[chemical structure]

[chemical structure]

[chemical structure]

[chemical structure]

[chemical structure]

[chemical structure]

[chemical structure]

[chemical structure]

[chemical structure]

[chemical structure]

[chemical structure]

[chemical structure]

[chemical structure]

[chemical structure]

[chemical structure]

[chemical structure]

[chemical structure]

[chemical structure]

[chemical structure]

[chemical structure]

[chemical structure]

[chemical structure]

[chemical structure]

[chemical structure]

[chemical structure]

[chemical structure]

[chemical structure]

[chemical structure]

[chemical structure]

[chemical structure]

[chemical structure]

[chemical structure]

[chemical structure]

[chemical structure]

[chemical structure]

[chemical structure]

[chemical structure]

[chemical structure]

[chemical structure]

[chemical structure]

[chemical structure]

[chemical structure]

[chemical structure]

[chemical structure]

[chemical structure]

[chemical structure]

[chemical structure]

[chemical structure]

[chemical structure]

[chemical structure]

[chemical structure]

[chemical structure]

[chemical structure]

[chemical structure]

[chemical structure]

[chemical structure]

[chemical structure]

[chemical structure]

[chemical structure]

[chemical structure]

[chemical structure]

[chemical structure]

[chemical structure]

[chemical structure]

[chemical structure]

[chemical structure]

[chemical structure]

[chemical structure]

[chemical structure]

[chemical structure]

[chemical structure]

[chemical structure]

[chemical structure]

[chemical structure]

[chemical structure]

[chemical structure]

[chemical structure]

[chemical structure]

[chemical structure]

[chemical structure]

[chemical structure]

[chemical structure]

[chemical structure]

[chemical structure]

[chemical structure]

[chemical structure]

[chemical structure]

[chemical structure]

[chemical structure]

[chemical structure]

[chemical structure]

[chemical structure]

[chemical structure]

[chemical structure]

[chemical structure]

[chemical structure]

[chemical structure]

[chemical structure]

[chemical structure]

[chemical structure]

[chemical structure]

[chemical structure]

[chemical structure]

[chemical structure]

[chemical structure]

[chemical structure]

[chemical structure]

[chemical structure]

[chemical structure]

[chemical structure]

[chemical structure]

[chemical structure]

[chemical structure]

[chemical structure]

[chemical structure]

[chemical structure]

[chemical structure]

[chemical structure]

[chemical structure]

[chemical structure]

[chemical structure]

[chemical structure]

[chemical structure]

[chemical structure]

[chemical structure]

[chemical structure]

[chemical structure]

[chemical structure]

[chemical structure]

[chemical structure]

[chemical structure]

[chemical structure]

[chemical structure]

[chemical structure]

[chemical structure]

[chemical structure]

[chemical structure]

[chemical structure]

[chemical structure]

[chemical structure]

[chemical structure]

[chemical structure]

[chemical structure]

[chemical structure]

[chemical structure]

[chemical structure]

[chemical structure]

[chemical structure]

[chemical structure]

[chemical structure]

[chemical structure]

[chemical structure]

[chemical structure]

[chemical structure]

[chemical structure]

[chemical structure]

[chemical structure]

[chemical structure]

[chemical structure]

[chemical structure]

[chemical structure]

[chemical structure]

[chemical structure]

[chemical structure]

[chemical structure]

[chemical structure]

[chemical structure]

[chemical structure]

[chemical structure]

[chemical structure]

[chemical structure]

[chemical structure]

[chemical structure]

[chemical structure]

[chemical structure]

[chemical structure]

[chemical structure]

[chemical structure]

[chemical structure]

[chemical structure]

[chemical structure]

[chemical structure]

[chemical structure]

[chemical structure]

[chemical structure]

[chemical structure]

[chemical structure]

[chemical structure]

[chemical structure]

[chemical structure]

[chemical structure]

[chemical structure]

[chemical structure]

[chemical structure]

[chemical structure]

[chemical structure]

[chemical structure]

[chemical structure]

[chemical structure]

[chemical structure]

[chemical structure]

[chemical structure]

[chemical structure]

[chemical structure]

[chemical structure]

[chemical structure]

[chemical structure]

[chemical structure]

[chemical structure]

[chemical structure]

[chemical structure]

[chemical structure]

[chemical structure]

[chemical structure]

[chemical structure]

[chemical structure]

[chemical structure]

[chemical structure]

[chemical structure]

[chemical structure]

[chemical structure]

[chemical structure]

[chemical structure]

[chemical structure]

[chemical structure]

[chemical structure]

[chemical structure]

[chemical structure]

[chemical structure]

[chemical structure]

[chemical structure]

[chemical structure]

[chemical structure]

[chemical structure]

[chemical structure]

[chemical structure]

[chemical structure]

[chemical structure]

[chemical structure]

[chemical structure]

[chemical structure]

[chemical structure]

[chemical structure]

[chemical structure]

[chemical structure]

[chemical structure]

[chemical structure]

[chemical structure]

[chemical structure]

[chemical structure]

[chemical structure]

[chemical structure]

[chemical structure]

[chemical structure]

[chemical structure]

[chemical structure]

[chemical structure]

[chemical structure]

[chemical structure]

[chemical structure]

[chemical structure]

[chemical structure]

[chemical structure]

[chemical structure]

[chemical structure]

[chemical structure]

[chemical structure]

[chemical structure]

[chemical structure]

[chemical structure]

[chemical structure]

[chemical structure]

[chemical structure]

[chemical structure]

[chemical structure]

[chemical structure]

[chemical structure]

[chemical structure]

[chemical structure]

[chemical structure]

[chemical structure]

[chemical structure]

[chemical structure]

[chemical structure]

[chemical structure]

[chemical structure]

[chemical structure]

[chemical structure]

[chemical structure]

[chemical structure]

[chemical structure]

[chemical structure]

[chemical structure]

[chemical structure]

[chemical structure]

[chemical structure]

[chemical structure]

[chemical structure]

[chemical structure]

[chemical structure]

[chemical structure]

[chemical structure]

[chemical structure]

[chemical structure]

[chemical structure]

[chemical structure]

[chemical structure]

[chemical structure]

[chemical structure]

[chemical structure]

[chemical structure]

[chemical structure]

[chemical structure]

[chemical structure]

[chemical structure]

[chemical structure]

[chemical structure]

[chemical structure]

[chemical structure]

[chemical structure]

[chemical structure]

[chemical structure]

[chemical structure]

[chemical structure]

[chemical structure]

[chemical structure]

[chemical structure]

[chemical structure]

[chemical structure]

[chemical structure]

[chemical structure]

[chemical structure]

[chemical structure]

[chemical structure]

[chemical structure]

[chemical structure]

[chemical structure]

[chemical structure]

[chemical structure]

[chemical structure]

[chemical structure]

[chemical structure]

[chemical structure]

[chemical structure]

[chemical structure]

[chemical structure]

[chemical structure]

[chemical structure]

[chemical structure]

[chemical structure]

[chemical structure]

[chemical structure]

[chemical structure]

[chemical structure]

[chemical structure]

[chemical structure]

[chemical structure]

[chemical structure]

[chemical structure]

[chemical structure]

[chemical structure]

[chemical structure]

[chemical structure]

[chemical structure]

[chemical structure]

[chemical structure]

[chemical structure]

[chemical structure]

[chemical structure]

[chemical structure]

[chemical structure]

[chemical structure]

[chemical structure]

[chemical structure]

[chemical structure]

[chemical structure]

[chemical structure]

[chemical structure]

[chemical structure]

[chemical structure]

[chemical structure]

[chemical structure]

[chemical structure]

[chemical structure]

[chemical structure]

[chemical structure]

[chemical structure]

[chemical structure]

[chemical structure]

[chemical structure]

[chemical structure]

[chemical structure]

[chemical structure]

[chemical structure]

[chemical structure]

[chemical structure]

[chemical structure]

[chemical structure]

[chemical structure]

[chemical structure]

[chemical structure]

[chemical structure]

[chemical structure]

[chemical structure]

[chemical structure]

[chemical structure]

[chemical structure]

[chemical structure]

[chemical structure]

[chemical structure]

[chemical structure]

[chemical structure]

[chemical structure]

[chemical structure]

[chemical structure]

[chemical structure]

[chemical structure]

[chemical structure]

[chemical structure]

[chemical structure]

[chemical structure]

[chemical structure]

[chemical structure]

[chemical structure]

[chemical structure]

[chemical structure]

[0943] In some embodiments, the transfer vehicle comprises Lipid A, Lipid B, Lipid C, and/or Lipid D. In some embodiments, inclusion of Lipid A, Lipid B, Lipid C, and/or Lipid D improves encapsulation and/or endosomal escape. In some embodiments, Lipid A, Lipid B, Lipid C, and/or Lipid D are described in international patent application PCT/US2017/028981.

[0944] In some embodiments, an ionizable lipid is Lipid A, which is (9Z,12Z)-3-((4,4-bis(octyloxy)butanoyl)oxy)-2-((((3-(diethylamino)propoxy)carbonyl)oxy)methyl)propyl octadeca9,12-dienoate, also called 3-((4,44bis(octyloxy)butanoyl)oxy)-2-((((3-(diethylamino)propoxy)carbonyl)oxy)methyl)propyl (9Z,12Z)-octadeca-9,12-dienoate. Lipid A can be depicted as:

[chemical structure]

[0945] Lipid A may be synthesized according to WO2015/095340 (e.g., pp. 84-86), incorporated by reference in its entirety.

[0946] In some embodiments, an ionizable lipid is Lipid B, which is ((5-((dimethylamino)methyl)-1,3-phenylene)bis(oxy))bis(octane-8,1-diyl)bis(decanoate). Lipid B can be depicted as:

[chemical structure]

[0947] Lipid B may be synthesized according to WO2014/136086 (e.g., pp. 107-09), incorporated by reference in its entirety.

[0948] In some embodiments, an ionizable lipid is Lipid C, which is 2-((4-(((3-(dimethylamino)propoxy)carbonyl)oxy)hexadecanoyl)oxy)propane-1,3-diyl(9Z,9′Z,12Z,12′Z)-bis(octadeca-9,12-dienoate). Lipid C can be depicted as:

[chemical structure]

[0949] In some embodiments, an ionizable lipid is Lipid D, which is 3-(((3-(dimethylamino)propoxy)carbonyl)oxy)-13-(octanoyloxy)tridecyl 3-octylundecanoate. Lipid D can be depicted as:

[chemical structure]

[0950] Lipid C and Lipid D may be synthesized according to WO2015/095340, incorporated by reference in its entirety.

[0951] In some embodiments, an ionizable lipid is described in US patent publication number 20190321489. In some embodiments, an ionizable lipid is described in international patent publication WO 2010/053572, incorporated herein by reference. In some embodiments, an ionizable lipid is C12-200, described at paragraph [00225] of WO 2010/053572.

[0952] Several ionizable lipids have been described in the literature, many of which are commercially available. In certain embodiments, such ionizable lipids are included in the transfer vehicles described herein. In some embodiments, the ionizable lipid N-[1-(2,3-dioleyloxy)propyl]-N,N,N-trimethylammonium chloride or “DOTMA” is used. (Felgner et al. Proc. Nat'l Acad. Sci. 84, 7413 (1987); U.S. Pat. No. 4,897,355). DOTMA can be formulated alone or can be combined with a neutral lipid, dioleoylphosphatidylethanolamine or “DOPE” or other cationic or non-cationic lipids into a lipid nanoparticle. Other suitable cationic lipids include, for example, ionizable cationic lipids as described in U.S. provisional patent application 61/617,468, filed Mar. 29, 2012 (incorporated herein by reference), such as, e.g., (15Z,18Z)-N,N-dimethyl-6-(9Z,12Z)-octadeca-9,12-dien-1-yl)tetracosa-15,18-dien-1-amine (HGT5000), (15Z,18Z)-N,N-dimethyl-6-((9Z,12Z)-octadeca-9,12-dien-1-yl)tetracosa-4,15,18-trien-1-amine (HGT5001), and (15Z,18Z)-N,N-dimethyl-6-((9Z,12Z)-octadeca-9,12-dien-1-yl)tetracosa-5,15,18-trien-1-amine (HGT5002), C12-200 (described in WO 2010/053572), 2-(2,2-di((9Z,12Z)-octadeca-9,12-dien-1-yl)-1,3-dioxolan-4-yl)-N,N-dimethylethanamine (DLinKC2-DMA)) (See, WO 2010/042877; Semple et al., Nature Biotech. 28:172-176 (2010)), 2-(2,2-di((9Z,2Z)-octadeca-9,12-dien-1-yl)-1,3-dioxolan-4-yl)-N,N-dimethylethanamine (DLin-KC2-DMA), (3S,10R,13R,17R)-10,13-dimethyl-17-((R)-6-methylheptan-2-yl)-2, 3, 4, 7, 8, 9, 10, 11, 12, 13, 14, 15, 16, 17-tetradecahydro-1H-cyclopenta[a]phenanthren-3-yl 3-(1H-imidazol-4-yl)propanoate (ICE), (15Z,18Z)-N,N-dimethyl-6-(9Z,12Z)-octadeca-9,12-dien-1-yl)tetracosa-15,18-dien-1-amine (HGT5000), (15Z,18Z)-N,N-dimethyl-6-((9Z,12Z)-octadeca-9,12-dien-1-yl)tetracosa-4,15,18-trien-1-amine (HGT5001), (15Z,18 Z)-N,N-dimethyl-6-((9Z,12Z)-octadeca-9,12-dien-1-yl)tetracosa-5,15,18-trien-1-amine (HGT5002), 5-carboxyspermylglycine-dioctadecylamide (DOGS), 2,3-dioleyloxy-N-[2(spermine-carboxamido)ethyl]-N,N-dimethyl-1-propanaminium (DOSPA) (Behr et al. Proc. Nat.'l Acad. Sci. 86, 6982 (1989); U.S. Pat. Nos. 5,171,678; 5,334,761), 1,2-Dioleoyl-3-Dimethylammonium-Propane (DODAP), 1,2-Dioleoyl-3-Trimethylammonium-Propane or (DOTAP). Contemplated ionizable lipids also include 1,2-distcaryloxy-N,N-dimethyl-3-aminopropane (DSDMA), 1,2-dioleyloxy-N,N-dimethyl-3-aminopropane (DODMA), 1,2-dilinoleyloxy-N,N-dimethyl-3-aminopropane (DLinDMA), 1,2-dilinolenyloxy-N,N-dimethyl-3-aminopropane (DLenDMA), N-dioleyl-N,N-dimethylammonium chloride (DODAC), N,N-distearyl-N,N-dimethylammonium bromide (DDAB), N-(1,2-dimyristyloxyprop-3-yl)-N,N-dimethyl-N-hydroxyethyl ammonium bromide (DMRIE), 3-dimethylamino-2-(cholest-5-en-3-beta-oxybutan-4-oxy)-1-(cis,cis-9,12-octadecadienoxy)propane (CLinDMA), 2-[5′-(cholest-5-en-3-beta-oxy)-3′-oxapentoxy)-3-dimethyl-1-(cis,cis-9′,1-2′-octadecadienoxy)propane (CpLinDMA), N,N-dimethyl-3,4-dioleyloxybenzylamine (DMOBA), 1,2-N,N′-dioleylcarbamyl-3-dimethylaminopropane (DOcarbDAP), 2,3-Dilinoleoyloxy-N,N-dimethylpropylamine (DLinDAP), 1,2-N,N′-Dilinoleylcarbamyl-3-dimethylamninopropane (DLincarbDAP), 1,2-Dilinoleoylcarbamyl-3-dimethylaminopropane (DLinCDAP), 2,2-dilinoleyl-4-dimethylaminomethyl-[1,3]-dioxolane (DLin-K-DMA), 2,2-dilinoleyl-4-dimethylaminoethyl-[1,3]-dioxolane (DLin-K-XTC2-DMA) or GL67, or mixtures thereof (Heyes, J., et al., J Controlled Release 107: 276-287 (2005); Morrissey, D V., et al., Nat. Biotechnol. 23(8): 1003-1007 (2005); PCT Publication WO2005/121348A1). The use of cholesterol-based ionizable lipids to formulate the transfer vehicles (e.g., lipid nanoparticles) is also contemplated by the present invention. Such cholesterol-based ionizable lipids can be used, either alone or in combination with other lipids. Suitable cholesterol-based ionizable lipids include, for example, DC-Cholesterol (N,N-dimethyl-N-ethylcarboxamidocholesterol), and 1,4-bis(3-N-oleylamino-propyl)piperazine (Gao, et al., Biochem. Biophys. Res. Comm. 179, 280 (1991); Wolf et al. BioTechniques 23, 139 (1997); U.S. Pat. No. 5,744,335).

[0953] Also contemplated are cationic lipids such as dialkylamino-based, imidazole-based, and guanidinium-based lipids. For example, also contemplated is the use of the ionizable lipid (3S,10R,13R,17R)-10,13-dimethyl-17-((R)-6-methylheptan-2-yl)-2,3,4,7,8,9,10,11,12,13,14,15,16,17-tetradecahydro-1H-cyclopenta[a]phenanthren-3-yl 3-(1H-imidazol-4-yl)propanoate (ICE), as disclosed in International Application No. PCT/US2010/058457, incorporated herein by reference.

[0954] Also contemplated are ionizable lipids such as the dialkylamino-based, imidazole-based, and guanidinium-based lipids. For example, certain embodiments are directed to a composition comprising one or more imidazole-based ionizable lipids, for example, the imidazole cholesterol ester or “ICE” lipid, (3S,10R,13R,17R)-10,13-dimethyl-17-((R)-6-methylheptan-2-yl)-2,3,4,7,8,9,10,11,12,13,14,15,16,17-tetradecahydro-1H-cyclopenta[a]phenanthren-3-yl 3-(1H-imidazol-4-yl)propanoate, as represented by structure (XIII) below. In an embodiment, a transfer vehicle for delivery of circRNA may comprise one or more imidazole-based ionizable lipids, for example, the imidazole cholesterol ester or “ICE” lipid (3S,10R,13R,17R)-10,13-dimethyl-17-((R)-6-methylheptan-2-yl)-2,3,4,7,9,10,11,12,13,14,15,16,17-tetradecahydro-1H-cyclopenta[a]phenanthren-3-yl 3-(1H-imidazol-4-yl)propanoate, as represented by structure (XIII).

[chemical structure]

[0955] Without wishing to be bound by a particular theory, it is believed that the fusogenicity of the imidazole-based cationic lipid ICE is related to the endosomal disruption which is facilitated by the imidazole group, which has a lower pKa relative to traditional ionizable lipids. The endosomal disruption in turn promotes osmotic swelling and the disruption of the liposomal membrane, followed by the transfection or intracellular release of the nucleic acid(s) contents loaded therein into the target cell.

[0956] The imidazole-based ionizable lipids are also characterized by their reduced toxicity relative to other ionizable lipids.

[0957] In some embodiments, an ionizable lipid is described by US patent publication number 20190314284. In certain embodiments, the an ionizable lipid is described by structure 3, 4, 5, 6, 7, 8, 9, or 10 (e.g., HGT4001, HGT4002, HGT4003, HGT4004 and/or HGT4005). In certain embodiments, the one or more cleavable functional groups (e.g., a disulfide) allow, for example, a hydrophilic functional head-group to dissociate from a lipophilic functional tail-group of the compound (e.g., upon exposure to oxidative, reducing or acidic conditions), thereby facilitating a phase transition in the lipid bilayer of the one or more target cells. For example, when a transfer vehicle (e.g., a lipid nanoparticle) comprises one or more of the lipids of structures 3-10, the phase transition in the lipid bilayer of the one or more target cells facilitates the delivery of the circRNA into the one or more target cells.

[0958] In certain embodiments, the ionizable lipid is described by structure (XIV),

[chemical structure]

wherein:
[0959] R₁ is selected from the group consisting of imidazole, guanidinium, amino, imine, enamine, an optionally-substituted alkyl amino (e.g., an alkyl amino such as dimethylamino) and pyridyl;
[0960] R₂ is selected from the group consisting of structure XV and structure XVI;

[chemical structure]

[chemical structure]

wherein R₃ and R₄ are each independently selected from the group consisting of an optionally substituted, variably saturated or unsaturated C₆-C₂₀ alkyl and an optionally substituted, variably saturated or unsaturated C₆-C₂₀ acyl; and wherein n is zero or any positive integer (e.g., one, two, three, four, five, six, seven, eight, nine, ten, eleven, twelve, thirteen, fourteen, fifteen, sixteen, seventeen, eighteen, nineteen, twenty or more). In certain embodiments, R₃ and R₄ are each an optionally substituted, polyunsaturated Cis alkyl, while in other embodiments R₃ and R₄ are each an unsubstituted, polyunsaturated C₁₈ alkyl. In certain embodiments, one or more of R₃ and R₄ are (9Z,12Z)-octadeca-9,12-dien.

[0961] Also disclosed herein are pharmaceutical compositions that comprise the compound of structure XIV, wherein R₁ is selected from the group consisting of imidazole, guanidinium, amino, imine, enamine, an optionally-substituted alkyl amino (e.g., an alkyl amino such as dimethylamino) and pyridyl; wherein R₂ is structure XV; and wherein n is zero or any positive integer. Further disclosed herein are pharmaceutical compositions comprising the compound of structure XIV, wherein R₁ is selected from the group consisting of imidazole, guanidinium, amino, imine, enamine, an optionally-substituted alkyl amino (e.g., an alkyl amino such as dimethylamino) and pyridyl; wherein R₂ is structure XVI; wherein R₃ and R₄ are each independently selected from the group consisting of an optionally substituted, variably saturated or unsaturated C₆-C₂₀ alkyl and an optionally substituted, variably saturated or unsaturated C₆-C₂₀ acyl; and wherein n is zero or any positive integer. In certain embodiments. R₃ and R₄ are each an optionally substituted, polyunsaturated C₁₈ alkyl, while in other embodiments R₃ and R₄ are each an unsubstituted, polyunsaturated C₁₈ alkyl (e.g., octadeca-9,12-dien).

[0962] In certain embodiments, the R₁ group or head-group is a polar or hydrophilic group (e.g., one or more of the imidazole, guanidinium and amino groups) and is bound to the R₂ lipid group by way of the disulfide (S—S) cleavable linker group, for example as depicted in structure XIV. Other contemplated cleavable linker groups may include compositions that comprise one or more disulfide (S—S) linker group bound (e.g., covalently bound) to, for example an alkyl group (e.g., C₁ to C₁₀ alkyl). In certain embodiments, the R1 group is covalently bound to the cleavable linker group by way of a C₁-C₂₀ alkyl group (e.g., where n is one to twenty), or alternatively may be directly bound to the cleavable linker group (e.g., where n is zero). In certain embodiments, the disulfide linker group is cleavable in vitro and/or in vivo (e.g., enzymatically cleavable or cleavable upon exposure to acidic or reducing conditions).

[0963] In certain embodiments, the inventions relate to the compound 5-(((10,13-dimethyl-17-(6-methylheptan-2-yl)-2,3,4,7,8,9,10,11,12,13,14,15,16,17-tetradecahydro-TH-cyclopenta[a]phenanthren-3-yl)disulfanyl)methyl)-1H-imidazole, having structure XVII (referred to herein as “HGT4001”).

[chemical structure]

[0964] In certain embodiments, the inventions relate to the compound 1-(2-(((3S,10R,13R)-10,13-dimethyl-17-((R)-6-methylheptan-2-yl)-2,3,4,7,8,9,10,11,12, 13, 14, 15, 16,17-tetradecahydro-1H-cyclopenta[a]phenanthren-3-yl)disulfanyl)ethyl)guanidine, having structure XVIII (referred to herein as “HGT4002”).

[chemical structure]

[0965] In certain embodiments, the inventions relate to the compound 2-((2,3-Bis((9Z,12Z)-octadeca-9,12-dien-1-yloxy)propyl)disulfanyl)-N,N-dimethylethanamine, having structure XIX (referred to herein as “HGT4003”).

[chemical structure]

[0966] In other embodiments, the inventions relate to the compound 5-(((2,3-bis((9Z,12Z)-octadeca-9,12-dien-1-yloxy)propyl)disulfanyl)methyl)-1H-imidazole having the structure of structure XX (referred to herein as “HGT4004”).

[chemical structure]

[0967] In still other embodiments, the inventions relate to the compound 1-(((2,3-bis((9Z,12Z)-octadeca-9,12-dien-1-yloxy)propyl)disulfanyl)methyl)guanidine having structure XXI (referred to herein as “HGT4005”).

[chemical structure]

[0968] In certain embodiments, the compounds described as structures 3-10 are ionizable lipids.

[0969] The compounds, and in particular the imidazole-based compounds described as structures 3-8 (e.g., HGT4001 and HGT4004), are characterized by their reduced toxicity, in particular relative to traditional ionizable lipids. In some embodiments, the transfer vehicles described herein comprise one or more imidazole-based ionizable lipid compounds such that the relative concentration of other more toxic ionizable lipids in such pharmaceutical or liposomal composition may be reduced or otherwise eliminated.

[0970] The ionizable lipids include those disclosed in international patent application PCT/US2019/025246, and US patent publications 2017/0190661 and 2017/0114010, incorporated herein by reference in their entirety. The ionizable lipids may include a lipid selected from the following tables 12, 13, 14, or 15.

TABLE 12

| | |
|---|---|
| [chemical structure] | ATX-001 |
| [chemical structure] | ATX-002 |
| [chemical structure] | ATX-003 |
| [chemical structure] | ATX-004 |
| [chemical structure] | ATX-005 |
| [chemical structure] | ATX-006 |
| [chemical structure] | ATX-007 |
| [chemical structure] | ATX-008 |
| [chemical structure] | ATX-009 |
| [chemical structure] | ATX-010 |
| [chemical structure] | ATX-011 |
| [chemical structure] | ATX-012 |
| [chemical structure] | ATX-013 |
| [chemical structure] | ATX-014 |
| [chemical structure] | ATX-015 |
| [chemical structure] | ATX-016 |
| [chemical structure] | ATX-017 |
| [chemical structure] | ATX-018 |
| [chemical structure] | ATX-019 |
| [chemical structure] | ATX-020 |
| [chemical structure] | ATX-021 |
| [chemical structure] | ATX-022 |
| [chemical structure] | ATX-023 |
| [chemical structure] | ATX-024 |
| [chemical structure] | ATX-025 |
| [chemical structure] | ATX-026 |
| [chemical structure] | ATX-027 |
| [chemical structure] | ATX-028 |
| [chemical structure] | ATX-029 |
| [chemical structure] | ATX-030 |
| [chemical structure] | ATX-031 |
| [chemical structure] | ATX-032 |

TABLE 13

| | |
|---|---|
| [chemical structure] | ATX-B-1 |
| [chemical structure] | ATX-B-2 |
| [chemical structure] | ATX-B-3 |
| [chemical structure] | ATX-B-4 |
| [chemical structure] | ATX-B-5 |
| [chemical structure] | ATX-B-6 |
| [chemical structure] | ATX-B-7 |
| [chemical structure] | ATX-B-8 |
| [chemical structure] | ATX-B-9 |
| [chemical structure] | ATX-B-10 |
| [chemical structure] | ATX-B-11 |
| [chemical structure] | ATX-B-12 |

TABLE 14

| Compound | ATX-# |
|---|---|
| [chemical structure] | 0063 |
| [chemical structure] | 0130 |
| [chemical structure] | 0131 |
| [chemical structure] | 0044 |
| [chemical structure] | 0111 |
| [chemical structure] | 0132 |
| [chemical structure] | 0134 |
| [chemical structure] | 0133 |
| [chemical structure] | 0064 |
| [chemical structure] | 0061 |
| [chemical structure] | 0100 |
| [chemical structure] | 0117 |
| [chemical structure] | 0114 |
| [chemical structure] | 0115 |
| [chemical structure] | 0101 |
| [chemical structure] | 0106 |
| [chemical structure] | 0116 |
| [chemical structure] | 0043 |
| [chemical structure] | 0086 |
| [chemical structure] | 0058 |
| [chemical structure] | 0081 |
| [chemical structure] | 0123 |
| [chemical structure] | 0122 |
| [chemical structure] | 0057 |
| [chemical structure] | 0088 |
| [chemical structure] | 0087 |
| [chemical structure] | 0124 |
| [chemical structure] | 0128 |
| [chemical structure] | 0127 |
| [chemical structure] | 0126 |
| [chemical structure] | 0129 |
| [chemical structure] | 0082 |
| [chemical structure] | 0085 |
| [chemical structure] | 0083 |
| [chemical structure] | 0121 |
| [chemical structure] | 0091 |
| [chemical structure] | 0102 |
| [chemical structure] | 0098 |
| [chemical structure] | 0092 |
| [chemical structure] | 0084 |
| [chemical structure] | 0095 |
| [chemical structure] | 0125 |
| [chemical structure] | 0094 |
| [chemical structure] | 0109 |
| [chemical structure] | 0110 |
| [chemical structure] | 0118 |
| [chemical structure] | 0108 |
| [chemical structure] | 0107 |
| [chemical structure] | 0093 |
| [chemical structure] | 0097 |
| [chemical structure] | 0096 |

TABLE 15

| | |
|---|---|
| [chemical structure] | 11 |
| [chemical structure] | 13 |

[0971] In some embodiments, an ionizable lipid is as described in international patent application PCT/US2019/015913. In some embodiments, an ionizable lipid is chosen from the following:

[chemical structure]

[chemical structure]

[chemical structure]

[chemical structure]

[chemical structure]

[chemical structure]

[chemical structure]

[chemical structure]

[chemical structure]

[chemical structure]

[chemical structure]

[chemical structure]

[chemical structure]

[chemical structure]

[chemical structure]

[chemical structure]

[chemical structure]

[chemical structure]

[chemical structure]

[chemical structure]

[chemical structure]

[chemical structure]

[chemical structure]

[chemical structure]

[chemical structure]

[chemical structure]

[chemical structure]

[chemical structure]

[chemical structure]

[chemical structure]

[chemical structure]

[chemical structure]

[chemical structure]

[chemical structure]

[chemical structure]

[chemical structure]

[chemical structure]

[chemical structure]

[chemical structure]

[chemical structure]

[chemical structure]

[chemical structure]

[chemical structure]

[chemical structure]

[chemical structure]

[chemical structure]

[chemical structure]

[chemical structure]

[chemical structure]

[chemical structure]

[chemical structure]

[chemical structure]

[chemical structure]

[chemical structure]

[chemical structure]

[chemical structure]

[chemical structure]

[chemical structure]

[chemical structure]

[chemical structure]

### Amine Lipids

[0972] In certain embodiments, transfer vehicle compositions for the delivery of circular RNA comprise an amine lipid. In certain embodiments, an ionizable lipid is an amine lipid. In some embodiments, an amine lipid is described in international patent application PCT/US2018/053569.

[0973] In some embodiments, the amine lipid is Lipid E, which is (9Z,12Z)-3-((4,4-bis(octyloxy)butanoyl)oxy)-2-((((3-(diethylamino)propoxy)carbonyl)oxy)methyl)propyl octadeca-9,12-dienoate.

[0974] Lipid E can be depicted as:

[chemical structure]

[0975] Lipid E may be synthesized according to WO2015/095340 (e.g., pp. 84-86). In certain embodiments, the amine lipid is an equivalent to Lipid E.

[0976] In certain embodiments, an amine lipid is an analog of Lipid E. In certain embodiments, a Lipid E analog is an acetal analog of Lipid E. In particular transfer vehicle compositions, the acetal analog is a C4-C12 acetal analog. In some embodiments, the acetal analog is a C5-C12 acetal analog. In additional embodiments, the acetal analog is a C5-C10 acetal analog. In further embodiments, the acetal analog is chosen from a C4, C5, C6, C7, C9, C10, C11 and C12 acetal analog.

[0977] Amine lipids and other biodegradable lipids suitable for use in the transfer vehicles, e.g., lipid nanoparticles, described herein are biodegradable in vivo. The amine lipids described herein have low toxicity (e.g., are tolerated in animal models without adverse effect in amounts of greater than or equal to 10 mg/kg). In certain embodiments, transfer vehicles composing an amine lipid include those where at least 75% of the amine lipid is cleared from the plasma within 8, 10, 12, 24, or 48 hours, or 3, 4, 5, 6, 7, or 10 days.

[0978] Biodegradable lipids include, for example, the biodegradable lipids of WO2017/173054, WO2015/095340, and WO2014/136086.

[0979] Lipid clearance may be measured by methods known by persons of skill in the art. See, for example, Maier, M. A., et al. Biodegradable Lipids Enabling Rapidly Eliminated Lipid Nanoparticles for Systemic Delivery of RNAi Therapeutics. Mol. Ther. 2013, 21(8), 1570-78.

[0980] Transfer vehicle compositions comprising an amine lipid can lead to an increased clearance rate. In some embodiments, the clearance rate is a lipid clearance rate, for example the rate at which a lipid is cleared from the blood, serum, or plasma. In some embodiments, the clearance rate is an RNA clearance rate, for example the rate at which an circRNA is cleared from the blood, serum, or plasma. In some embodiments, the clearance rate is the rate at which transfer vehicles are cleared from the blood, serum, or plasma. In some embodiments, the clearance rate is the rate at which transfer vehicles are cleared from a tissue, such as liver tissue or spleen tissue. In certain embodiments, a high rate of clearance leads to a safety profile with no substantial adverse effects. The amine lipids and biodegradable lipids may reduce transfer vehicle accumulation in circulation and in tissues. In some embodiments, a reduction in transfer vehicle accumulation in circulation and in tissues leads to a safety profile with no substantial adverse effects.

[0981] Lipids may be ionizable depending upon the pH of the medium they are in. For example, in a slightly acidic medium, the lipid, such as an amine lipid, may be protonated and thus bear a positive charge. Conversely, in a slightly basic medium, such as, for example, blood, where pH is approximately 7.35, the lipid, such as an amine lipid, may not be protonated and thus bear no charge.

[0982] The ability of a lipid to bear a charge is related to its intrinsic pKa. In some embodiments, the amine lipids of the present disclosure may each, independently, have a pKa in the range of from about 5.1 to about 7.4. In some embodiments, the bioavailable lipids of the present disclosure may each, independently, have a pKa in the range of from about 5.1 to about 7.4. For example, the amine lipids of the present disclosure may each, independently, have a pKa in the range of from about 5.8 to about 6.5. Lipids with a pKa ranging from about 5.1 to about 7.4 are effective for delivery of cargo in vivo, e.g., to the liver. Further, it has been found that lipids with a pKa ranging from about 5.3 to about 6.4 are effective for delivery in vivo, e.g., into tumors. See, e.g., WO2014/136086.

### Lipids Containing a Disulfide Bond

[0983] In some embodiments, the ionizable lipid is described in U.S. Pat. No. 9,708,628.

[0984] The present invention provides a lipid represented by structure (XXII):

[chemical structure]

[0985] In structure (XXII), X^{a} and X^{b} are each independently X¹ or X² shown below.

[chemical structure]

[0986] R⁴ in X¹ is an alkyl group having 1-6 carbon atoms, which may be linear, branched or cyclic. The alkyl group preferably has a carbon number of 1-3. Specific examples of the alkyl group having 1-6 carbon atoms include methyl group, ethyl group, propyl group, isopropyl group, n-butyl group, sec-butyl group, isobutyl group, tert-butyl group, pentyl group, isopentyl group, neopentyl group, t-pentyl group, 1,2-dimethylpropyl group, 2-methylbutyl group, 2-methylpentyl group, 3-methylpentyl group, 2,2-dimethylbutyl group, 2,3-dimethylbutyl group, cyclohexyl group and the like. R⁴ is preferably a methyl group, an ethyl group, a propyl group or an isopropyl group, most preferably a methyl group.

[0987] The s in X² is 1 or 2. When s is 1, X² is a pyrrolidinium group, and when s is 2, X² is a piperidinium group. s is preferably 2. While the binding direction of X² is not limited, a nitrogen atom in X² preferably binds to R^{1a} and R^{1b}.

[0988] X^{a} may be the same as or different from X^{b}, and X^{a} is preferably the same group as X^{b}.

[0989] n^{a} and n^{b} are each independently 0 or 1, preferably 1. When n^{a} is 1, R^{3a} binds to X^{a} via Y^{a} and R^{2a}, and when n^{a} is 0, a structure of R^{3a}—X^{a}—R^{1a}—S— is taken. Similarly, when n^{b} is 1, R^{3b} binds to X^{b} via Y^{b} and R^{2b}, and when n^{b} is 0, a structure of R^{3b}—X^{b}—R^{1b}—S— is taken.

[0990] n^{a} may be the same as or different from n^{b}, and n^{a} is preferably the same as n^{b}.

[0991] R^{1a} and R^{1b} are each independently an alkylene group having 1-6 carbon atoms, which may be linear or branched, preferably linear. Specific examples of the alkylene group having 1-6 carbon atoms include methylene group, ethylene group, trimethylene group, isopropylene group, tetramethylene group, isobutylene group, pentamethylene group, neopentylene group and the like. R^{1a} and R^{1b} are each preferably a methylene group, an ethylene group, a trimethylene group, an isopropylene group or a tetramethylene group, most preferably an ethylene group.

[0992] R^{1a} may be the same as or different from R^{1b}, and R^{1a} is preferably the same group as R^{1b}.

[0993] R^{2a} and R^{2b} are each independently an alkylene group having 1-6 carbon atoms, which may be linear or branched, preferably linear. Examples of the alkylene group having 1-6 carbon atoms include those recited as the examples of the alkylene group having 1-6 carbon atoms for R^{1a} or R^{1b}. R^{2a} and R^{2b} are each preferably a methylene group, an ethylene group, a trimethylene group, an isopropylene group or a tetramethylene group.

[0994] When X^{a} and X^{b} are each X¹, R^{2a} and R^{2b} are preferably trimethylene groups. When X^{a} and X^{b} are each X², R^{2a} and R^{2b} are preferably ethylene groups.

[0995] R^{2a} may be the same as or different from R^{2b}, and R^{2a} is preferably the same group as R^{2b}.

[0996] Y^{a} and Y^{b} are each independently an ester bond, an amide bond, a carbamate bond, an ether bond or a urea bond, preferably an ester bond, an amide bond or a carbamate bond, most preferably an ester bond. While the binding direction of Y^{a} and Y^{b} is not limited, when Y^{a} is an ester bond, a structure of R^{3a}—CO—O—R^{2a}— is preferable, and when Y^{b} is an ester bond, a structure of R^{3b}—CO—O—R^{2b}— is preferable.

[0997] Y^{a} may be the same as or different from Y^{b}, and Y^{a} is preferably the same group as Y^{b}.

[0998] R^{3a} and R^{3b} are each independently a sterol residue, a liposoluble vitamin residue or an aliphatic hydrocarbon group having 12-22 carbon atoms, preferably a liposoluble vitamin residue or an aliphatic hydrocarbon group having 12-22 carbon atoms, most preferably a liposoluble vitamin residue.

[0999] Examples of the sterol residue include a cholesteryl group (cholesterol residue), a cholestaryl group (cholestanol residue), a stigmasteryl group (stigmasterol residue), a β-sitosteryl group (β-sitosterol residue), a lanosteryl group (lanosterol residue), and an ergosteryl group (ergosterol residue) and the like. The sterol residue is preferably a cholesteryl group or a cholestaryl group.

[1000] As the liposoluble vitamin residue, a residue derived from liposoluble vitamin, as well as a residue derived from a derivative obtained by appropriately converting a hydroxyl group, aldehyde or carboxylic acid, which is a functional group in liposoluble vitamin, to other reactive functional group can be used. As for liposoluble vitamin having a hydroxyl group, for example, the hydroxyl group can be converted to a carboxylic acid by reacting with succinic acid anhydride, glutaric acid anhydride and the like. Examples of the liposoluble vitamin include retinoic acid, retinol, retinal, ergosterol, 7-dehydrocholesterol, calciferol, cholecalciferol, dihydroergocalciferol, dihydrotachysterol, tocopherol, tocotrienol and the like. Preferable examples of the liposoluble vitamin include retinoic acid and tocopherol.

[1001] The aliphatic hydrocarbon group having 12-22 carbon atoms may be linear or branched, preferably linear. The aliphatic hydrocarbon group may be saturated or unsaturated. In the case of an unsaturated aliphatic hydrocarbon group, the aliphatic hydrocarbon group generally contains 1-6, preferably 1-3, more preferably 1-2 unsaturated bonds. While the unsaturated bond includes a carbon-carbon double bond and a carbon-carbon triple bond, it is preferably a carbon-carbon double bond. The aliphatic hydrocarbon group has a carbon number of preferably 12-18, most preferably 13-17. While the aliphatic hydrocarbon group includes an alkyl group, an alkenyl group, an alkynyl group and the like, it is preferably an alkyl group or an alkenyl group. Specific examples of the aliphatic hydrocarbon group having 12-22 carbon atoms include dodecyl group, tridecyl group, tetradecyl group, pentadecyl group, hexadecyl group, heptadecyl group, octadecyl group, nonadecyl group, icosyl group, henicosyl group, docosyl group, dodecenyl group, tridecenyl group, tetradecenyl group, pentadecenyl group, hexadecenyl group, heptadecenyl group, octadecenyl group, nonadecenyl group, icosenyl group, henicosenyl group, docosenyl group, decadienyl group, tridecadienyl group, tetradecadienyl group, pentadecadienyl group, hexadecadienyl group, heptadecadienyl group, octadecadienyl group, nonadecadienyl group, icosadienyl group, henicosadienyl group, docosadienyl group, octadecatrienyl group, icosatrienyl group, icosatetraenyl group, icosapentaenyl group, docosahexaenyl group, isostearyl group and the like. The aliphatic hydrocarbon group having 12-22 carbon atoms is preferably tridecyl group, tetradecyl group, heptadecyl group, octadecyl group, heptadecadienyl group or octadecadienyl group, particularly preferably tridecyl group, heptadecyl group or heptadecadienyl group.

[1002] In one embodiment, an aliphatic hydrocarbon group having 12-22 carbon atoms, which is derived from fatty acid, aliphatic alcohol, or aliphatic amine is used. When R^{3a} (or R^{3b}) is derived from fatty acid, Y^{a} (or Y^{b}) is an ester bond or an amide bond, and fatty acid-derived carbonyl carbon is included in Y^{a} (or Y^{b}). For example, when linoleic acid is used, R^{3a} (or R^{3b}) is a heptadecadienyl group.

[1003] R^{3a} may be the same as or different from R^{3b}, and R^{3a} is preferably the same group as R^{3b}.

[1004] In one embodiment, X^{a} is the same as X^{b}, n^{a} is the same as n^{b}, R^{1a} is the same as R^{1b}, R^{2a} is the same as R^{2b}, R^{3a} is the same as R^{3b}, and Y^{a} is the same as Y^{b}.

[1005] In one embodiment,
[1006] X^{a} and X^{b} are each independently X1,
[1007] R⁴ is an alkyl group having 1-3 carbon atoms, n^{a} and n^{b} are each 1,
[1008] R^{1a} and R^{1b} are each independently an alkylene group having 1-6 carbon atoms,
[1009] R^{2a} and R^{2b} are each independently an alkylene group having 1-6 carbon atoms,
[1010] Y^{a} and Y^{b} are each an ester bond or an amide bond, and
[1011] R^{3a} and R^{3b} are each independently an aliphatic hydrocarbon group having 12-22 carbon atoms.

[1012] In one embodiment,
[1013] X^{a} and X^{b} are each X1,
[1014] R⁴ is an alkyl group having 1-3 carbon atoms, n^{a} and n^{b} are each 1,
[1015] R^{1a} and R^{1b} are each an alkylene group having 1-6 carbon atoms,
[1016] R^{2a} and R^{2b} are each an alkylene group having 1-6 carbon atoms,
[1017] Y^{a} and Y^{b} are each an ester bond or an amide bond,
[1018] R^{3a} and R^{3b} are each an aliphatic hydrocarbon group having 12-22 carbon atoms,
[1019] X^{a} is the same as X^{b},
[1020] R^{1a} is the same as R^{1b},
[1021] R^{2a} is the same as R^{2b}, and
[1022] R^{3a} is the same as R^{3b}.

[1023] In one embodiment,
[1024] X^{a} and X^{b} are each X¹,
[1025] R⁴ is a methyl group, n^{a} and n^{b} are each 1,
[1026] R^{1a} and R^{1b} are each an ethylene group,
[1027] R^{2a} and R^{2b} are each a trimethylene group,
[1028] Y^{a} and Y^{b} are each —CO—O—, and
[1029] R^{3a} and R^{3b} are each independently an alkyl group or alkenyl group having 13-17 carbon atoms.

[1030] In one embodiment,
[1031] X^{a} and X^{b} are each X¹,
[1032] R⁴ is a methyl group, n^{a} and n^{b} are each 1,
[1033] R^{1a} and R^{1b} are each an ethylene group,
[1034] R^{2a} and R^{2b} are each a trimethylene group,
[1035] Y^{a} and Y^{b} are each —CO—O—,
[1036] R^{3a} and R^{3b} are each an alkyl group or alkenyl group having 13-17 carbon atoms, and
[1037] R^{3a} is the same as R^{3b}.

[1038] In one embodiment,
[1039] X^{a} and X^{b} are each independently X¹,
[1040] R⁴ is an alkyl group having 1-3 carbon atoms, n^{a} and n^{b} are each 1,
[1041] R^{1a} and R^{1b} are each independently an alkylene group having 1-6 carbon atoms,
[1042] R^{2a} and R^{2b} are each independently an alkylene group having 1-6 carbon atoms,
[1043] Y^{a} and Y^{b} are each an ester bond or an amide bond, and
[1044] R^{3a} and R^{3b} are each independently a liposoluble vitamin residue (e.g., retinoic acid residue, tocopherol residue).

[1045] In one embodiment,
[1046] X^{a} and X^{b} are each X¹,
[1047] R⁴ is an alkyl group having 1-3 carbon atoms, n^{a} and n^{b} are each 1,
[1048] R^{1a} and R^{1b} are each an alkylene group having 1-6 carbon atoms,
[1049] R^{2a} and R^{2b} are each an alkylene group having 1-6 carbon atoms,
[1050] Y^{a} and Y^{b} are each an ester bond or an amide bond,
[1051] R^{3a} and R^{3b} are each a liposoluble vitamin residue (e.g., retinoic acid residue, tocopherol residue),
[1052] X^{a} is the same as X^{b},
[1053] R^{1a} is the same as R^{1b},
[1054] R^{2a} is the same as R^{2b}, and
[1055] R^{3a} is the same as R^{3b}.

[1056] In one embodiment,
[1057] X^{a} and X^{b} are each X¹,
[1058] R⁴ is a methyl group, n^{a} and n^{b} are each 1,
[1059] R^{1a} and R^{1b} are each an ethylene group,
[1060] R^{2a} and R^{2b} are each a trimethylene group,
[1061] Y^{a} and Y^{b} are each —CO—O—, and
[1062] R^{3a} and R^{3b} are each independently a liposoluble vitamin residue (e.g., retinoic acid residue, tocopherol residue).

[1063] In one embodiment,
[1064] X^{a} and X^{b} are each X¹,
[1065] R⁴ is a methyl group, n^{a} and n^{b} are each 1,
[1066] R^{1a} and R^{1b} are each an ethylene group,
[1067] R^{2a} and R^{2b} are each a trimethylene group,
[1068] Y^{a} and Y^{b} are each —CO—O—,
[1069] R^{3a} and R^{3b} are each a liposoluble vitamin residue (e.g., retinoic acid residue, tocopherol residue), and
[1070] R^{3a} is the same as R^{3b}.

[1071] In one embodiment,
[1072] X^{a} and X^{b} are each independently X²,
[1073] t is 2,
[1074] R^{1a} and R^{1b} are each independently an alkylene group having 1-6 carbon atoms,
[1075] R^{2a} and R^{2b} are each independently an alkylene group having 1-6 carbon atoms,
[1076] Y^{a} and Y^{b} are each an ester bond, and
[1077] R^{3a} and R^{3b} are each independently a liposoluble vitamin residue (e.g., retinoic acid residue, tocopherol residue) or an aliphatic hydrocarbon group having 12-22 carbon atoms (e.g., alkyl group having 12-22 carbon atoms).

[1078] In one embodiment,
[1079] X^{a} and X^{b} are each independently X²,
[1080] t is 2,
[1081] R^{1a} and R^{1b} are each independently an alkylene group having 1-6 carbon atoms,
[1082] R^{2a} and R^{2b} are each independently an alkylene group having 1-6 carbon atoms,
[1083] Y^{a} and Y^{b} are each an ester bond,
[1084] R^{3a} and R^{3b} are each independently a liposoluble vitamin residue (e.g., retinoic acid residue, tocopherol residue) or an aliphatic hydrocarbon group having 12-22 carbon atoms (e.g., alkyl group having 12-22 carbon atoms),
[1085] X^{a} is the same as X^{b},
[1086] R^{1a} is the same as Rib,
[1087] R^{2a} is the same as R^{2b}, and
[1088] R^{3a} is the same as R^{3b}.

[1089] In one embodiment,
[1090] X^{a} and X^{b} are each independently X²,
[1091] t is 2,
[1092] R^{1a} and R^{1b} are each an ethylene group,
[1093] R^{2a} and R^{2b} are each independently an alkylene group having 1-6 carbon atoms,
[1094] Y^{a} and Y^{b} are each an ester bond,
[1095] R^{3a} and R^{3b} are each independently a liposoluble vitamin residue (e.g., retinoic acid residue, tocopherol residue) or an aliphatic hydrocarbon group having 12-22 carbon atoms (e.g., alkyl group having 12-22 carbon atoms),
[1096] X^{a} is the same as X^{b},
[1097] R^{2a} is the same as R^{2b}, and
[1098] R^{3a} is the same as R^{3b}.

[1099] In some embodiments, an ionizable lipid has one of the structures set forth in Table 15b below.

TABLE 15b

| Number | Structure |
|---|---|
| 1 | [chemical structure] |
| 2 | [chemical structure] |
| 3 | [chemical structure] |
| 4 | [chemical structure] |
| 5 | [chemical structure] |
| 6 | [chemical structure] |
| 7 | [chemical structure] |
| 8 | [chemical structure] |
| 9 | [chemical structure] |
| 10 | [chemical structure] |
| 11 | [chemical structure] |
| 12 | [chemical structure] |
| 13 | [chemical structure] |
| 14 | [chemical structure] |
| 15 | [chemical structure] |

[1100] A lipid of the present invention may have an —S—S— (disulfide) bond. The production method for such a compound includes, for example, a method including producing

R^{3a}—(Y^{a}—R^{2a})n^{a}-X^{a}—R^{1a}—SH, and

R^{3b}—(Y^{b}—R^{2b})n^{b}-X^{b}—R^{1b}—SH, and

subjecting them to oxidation (coupling) to give a compound containing —S—S—, a method including sequentially bonding necessary parts to a compound containing an —S—S— bond to finally obtain the compound of the present invention and the like. Preferred is the latter method.

[1101] A specific example of the latter method is shown below, which is not to be construed as limiting.

[1102] Examples of the starting compound include —S—S— bond-containing two terminal carboxylic acid, two terminal carboxylate, two terminal amine, two terminal isocyanate, two terminal alcohol, two terminal alcohol having a leaving group such as MsO (mesylate group) and the like, a two terminal carbonate having a leaving group such as pNP (p-nitrophenylcarbonate group) and the like.

[1103] For example, when a compound containing X¹ or X² for X^{a} and X^{b} is produced, two terminal functional groups of compound (1) containing an —S—S— bond are reacted with an —NH— group in compound (2) having the —NH— group and one functional group at the terminal, the functional group at the terminal in compound (2) which did not contribute to the reaction is reacted with a functional group in compound (3) containing R³, whereby the compound of the present invention containing an —S—S— bond, R^{1a} and R^{1b}, X^{a} and X^{b}, R^{2a} and R^{2b}, Y^{a} and Y^{b}, and R^{3a} and R^{3b} can be obtained.

[1104] In the reaction of compound (1) and compound (2), an alkali catalyst such as potassium carbonate, sodium carbonate, potassium t-butoxide and the like may be used as a catalyst, or the reaction may be performed without a catalyst. Preferably, potassium carbonate or sodium carbonate is used as a catalyst.

[1105] The amount of catalyst is 0.1-100 molar equivalents, preferably, 0.1-20 molar equivalents, more preferably 0.1-5 molar equivalents, relative to compound (1). The amount of compound (2) to be charged is 1-50 molar equivalents, preferably 1-10 molar equivalents, relative to compound (1).

[1106] The solvent to be used for the reaction of compound (1) and compound (2) is not particularly limited as long as it is a solvent or aqueous solution that does not inhibit the reaction. For example, ethyl acetate, dichloromethane, chloroform, benzene, toluene and the like can be mentioned. Among these, toluene and chloroform are preferable.

[1107] The reaction temperature is −20 to 200° C., preferably 0 to 80° C., more preferably 20 to 50° C., and the reaction time is 1-48 hr, preferably 2-24 hr.

[1108] When the reaction product of compound (1) and compound (2) is reacted with compound (3), an alkali catalyst such as potassium carbonate, sodium carbonate, potassium t-butoxide and the like, or an acid catalyst such as PTS (p-toluenesulfonic acid), MSA (methanesulfonic acid) and the like may be used, like the catalyst used for the reaction of compound (1) and compound (2), or the reaction may be performed without a catalyst.

[1109] In addition, the reaction product of compound (1) and compound (2) may be directly reacted with compound (3) by using a condensing agent such as DCC (dicyclohexylcarbodiimide), DIC (diisopropylcarbodiimide), EDC (1-ethyl-3-(3-dimethylaminopropyl)carbodiimide hydrochloride) and the like. Alternatively, compound (3) may be treated with a condensing agent to be once converted to an anhydride and the like, after which it is reacted with the reaction product of compound (1) and compound (2).

[1110] The amount of compound (3) to be charged is 1-50 molar equivalents, preferably 1-10 molar equivalents, relative to the reaction product of compound (1) and compound (2).

[1111] The catalyst to be used is appropriately selected according to the functional groups to be reacted.

[1112] The amount of catalyst is 0.05-100 molar equivalents, preferably 0.1-20 molar equivalents, more preferably 0.2-5 molar equivalent, relative to compound (1).

[1113] The solvent to be used for the reaction of the reaction product of compound (1) and compound (2) with compound (3) is not particularly limited as long as it is a solvent or aqueous solution that does not inhibit the reaction. For example, ethyl acetate, dichloromethane, chloroform, benzene, toluene and the like can be mentioned. Among these, toluene and chloroform are preferable.

[1114] The reaction temperature is 0 to 200° C., preferably 0 to 120° C., more preferably 20 to 50° C., and the reaction time is 1 hr-48 hr, preferably 2-24 hr.

[1115] The reaction product obtained by the above-mentioned reaction can be appropriately purified by a general purification method, for example, washing with water, silica gel column chromatography, crystallization, recrystallization, liquid-liquid extraction, reprecipitation, ion exchange column chromatography and the like.

### Structure XXIH Lipids

[1116] In some embodiments, an ionizable lipid is described in U.S. Pat. No. 9,765,022.

[1117] The present invention provides a compound represented by structure (XXIII):

[chemical structure]

[1118] In structure XXIII, a hydrophilic and optionally positively charged head is

[chemical structure]

in which each of Rₐ, Rₐ′, Rₐ″, and Rₐ′″, independently, is H, a C₁-C₂₀ monovalent aliphatic radical, a C₁-C₂₀ monovalent heteroaliphatic radical, a monovalent aryl radical, or a monovalent heteroaryl radical, and Z is a C₁-C₂₀ bivalent aliphatic radical, a C₁-C₂₀ bivalent heteroaliphatic radical, a bivalent aryl radical, or a bivalent heteroaryl radical; B is a C₁-C₂₄ monovalent aliphatic radical, a C₁-C₂₄ monovalent heteroaliphatic radical, a monovalent aryl radical, a monovalent heteroaryl radical, or

[chemical structure]

each of R₁ and R₄, independently, is a bond, a C₁-C₁₀ bivalent aliphatic radical, a C₁-C₁₀ bivalent heteroaliphatic radical, a bivalent aryl radical, or a bivalent heteroaryl radical; each of R₂ and R₅, independently, is a bond, a C₁-C₂₀ bivalent aliphatic radical, a C₁-C₂₀ bivalent heteroaliphatic radical, a bivalent aryl radical, or a bivalent heteroaryl radical; each of R₃ and R₆, independently, is a C₁-C₂₀ monovalent aliphatic radical, a C₁-C₂₀ monovalent heteroaliphatic radical, a monovalent aryl radical, or a monovalent heteroaryl radical; each of

[chemical structure]

a hydrophobic tail, and

[chemical structure]

also a hydrophobic tail, has 8 to 24 carbon atoms; and each of X, a linker, and Y, also a linker, independently, is

[chemical structure]

in which each of m, n, p, q, and t, independently, is 1-6; W is O, S, or NR_{c}; each of L₁, L₃, L₅, L₇, and L₉, directly linked to R₁, R₂, R₄, or R₅, independently, is a bond, O, S, or NR_{d}; each of L₂, L₄, L₆, L₈, and L₁₀, independently, is a bond, O, S, or NRₑ; V is OR_{f}, SR_{g}, or NRₕRᵢ; and each of R_{b}, R_{c}, R_{d}, Rₑ, R_{f}, R_{g}, Rₕ, and Rᵢ, independently, is H, OH, C₁₋₁₀ oxyaliphatic radical, C₁-C₁₀ monovalent aliphatic radical, C₁-C₁₀ monovalent heteroaliphatic radical, a monovalent aryl radical, or a monovalent heteroaryl radical.

[1119] A subset of the above-described lipid-like compounds include those in which A is

[chemical structure]

each of Rₐ and Rₐ′, independently, being a C₁-C₁₀ monovalent aliphatic radical, a C₁-C₁₀ monovalent heteroaliphatic radical, a monovalent aryl radical, or a monovalent heteroaryl radical; and Z being a C₁-C₁₀ bivalent aliphatic radical, a C₁-C₁₀ bivalent heteroaliphatic radical, a bivalent aryl radical, or a bivalent heteroaryl radical.

[1120] Some lipid-like compounds of this invention feature each of R₁ and R₄, independently, being C₁-C₆ (e.g., C₁-C₄) bivalent aliphatic radical or a C₁-C₆ (e.g., C₁-C₄) bivalent heteroaliphatic radical, the total carbon number for R₂ and R₃ being 12-20 (e.g., 14-18), the total carbon number of R₅ and R₆ also being 12-20 (e.g., 14-18), and each of X and Y, independently, is

[chemical structure]

[1121] Specific examples of X and Y include

[chemical structure]

m being 2-6.

[1122] Still within the scope of this invention is a pharmaceutical composition containing a nanocomplex that is formed of a protein and a bioreducible compound. In this pharmaceutical composition, the nanocomplex has a particle size of 50 to 500 nm; the bioreducible compound contains a disulfide hydrophobic moiety, a hydrophilic moiety, and a linkerjoining the disulfide hydrophobic moiety and the hydrophilic moiety; and the protein binds to the bioreducible compound via a non-covalent interaction, a covalent bond, or both.

[1123] In certain embodiments, the disulfide hydrophobic moiety is a heteroaliphatic radical containing one or more —S—S— groups and 8 to 24 carbon atoms; the hydrophilic moiety is an aliphatic or heteroaliphatic radical containing one or more hydrophilic groups and 1-20 carbon atoms, each of the hydrophilic groups being amino, alkylamino, dialkylamino, trialkylamino, tetraalkylammonium, hydroxyamino, hydroxyl, carboxyl, carboxylate, carbamate, carbamide, carbonate, phosphate, phosphite, sulfate, sulfite, or thiosulfate; and the linker is O, S, Si, C₁-C₆ alkylene,

[chemical structure]

or in which the variables are defined above.

[1124] Specific examples of X and Y include O, S, Si, C₁-C₆ alkylene,

[chemical structure]

[1125] In some embodiments, a lipid-like compound of this invention, as shown instructure XXIII above, includes (i) a hydrophilic head, A; (ii) a hydrophobic tail, R₂—S—S—R₃; and (iii) a linker, X. Optionally, these compounds contain a second hydrophobic tail, R₅—S—S—R₆ and a second linker, Y.

[1126] The hydrophilic head of structure XXIII contains one or more hydrophilic functional groups, e.g., hydroxyl, carbonyl, carboxyl, amino, sulfhydryl, phosphate, amide, ester, ether, carbamate, carbonate, carbamide, and phosphodiester. These groups can form hydrogen bonds and are optionally positively or negatively charged.

[1127] Examples of the hydrophilic head include:

[chemical structure]

[chemical structure]

[chemical structure]

[chemical structure]

[chemical structure]

[1128] Other examples include those described in Akinc et al., Nature Biotechnology, 26, 561-69 (2008) and Mahon et al., US Patent Application Publication 2011/0293703.

[1129] The hydrophobic tail of structure XXIII is a saturated or unsaturated, linear or branched, acyclic or cyclic, aromatic or nonaromatic hydrocarbon moiety containing a disulfide bond and 8-24 carbon atoms. One or more of the carbon atoms can be replaced with a heteroatom, such as N, O, P, B, S, Si, Sb, Al, Sn, As, Se, and Ge. The tail is optionally substituted with one or more groups described above. The lipid-like compounds containing this disulfide bond can be bioreducible.

[1130] Examples include:

[chemical structure]

[1131] A linker of structure XXIII links the hydrophilic head and the hydrophobic tail. The linker can be any chemical group that is hydrophilic or hydrophobic, polar or non-polar, e.g., O, S, Si, amino, alkylene, ester, amide, carbamate, carbamide, carbonate, phosphate, phosphite, sulfate, sulfite, and thiosulfate. Examples include:

[chemical structure]

[1132] Shown below are exemplary lipid-like compounds of this invention:

[chemical structure]

[chemical structure]

[1133] The lipid-like compounds of structure XXIII can be prepared by methods well known the art. See Wang et al., ACS Synthetic Biology, 1, 403-07 (2012); Manoharan, et al., International Patent Application Publication WO 2008/042973; and Zugates et al., U.S. Pat. No. 8,071,082. The route shown below exemplifies synthesis of these lipid-like compounds:

[chemical structure]

[1134] Each of Lₐ, Lₐ′, L, and L′ can be one of L₁-L₁₀; each of Wₐ and W_{b}, independently, is W or V; and Rₐ and R₁-R₆ are defined above, as well as L₁-L₁₀, W, and V.

[1135] In this exemplary synthetic route, an amine compound, i.e., compound D, reacts with bromides E1 and E2 to form compound F, which is then coupled with both G1 and G2 to afford the final product, i.e., compound H. One or both of the double bonds in this compound (shown above) can be reduced to one or two single bonds to obtain different lipid-like compounds of structure XXIII.

[1136] Other lipid-like compounds of this invention can be prepared using other suitable starting materials through the above-described synthetic route and others known in the art. The method set forth above can include an additional step(s) to add or remove suitable protecting groups in order to ultimately allow synthesis of the lipid-like compounds. In addition, various synthetic steps can be performed in an alternate sequence or order to give the desired material. Synthetic chemistry transformations and protecting group methodologies (protection and deprotection) useful in synthesizing applicable lipid-like compounds are known in the art, including, for example, R. Larock, Comprehensive Organic Transformations (2nd Ed., VCH Publishers 1999); P. G. M. Wuts and T. W. Greene, Greene's Protective Groups in Organic Synthesis (4th Ed., John Wiley and Sons 2007); L. Fieser and M. Fieser, Fieser and Fieser's Reagents for Organic Synthesis (John Wiley and Sons 1994); and L. Paquette, ed., Encyclopedia of Reagents for Organic Synthesis (2nd ed., John Wiley and Sons 2009) and subsequent editions thereof. Certain lipid-like compounds may contain a non-aromatic double bond and one or more asymmetric centers. Thus, they can occur as racemates and racemic mixtures, single enantiomers, individual diastereomers, diastereomeric mixtures, and cis- or trans-isomeric forms. All such isomeric forms are contemplated.

[1137] As mentioned above, these lipid-like compounds are useful for delivery of pharmaceutical agents. They can be preliminarily screened for their efficacy in delivering pharmaceutical agents by an in vitro assay and then confirmed by animal experiments and clinic trials. Other methods will also be apparent to those of ordinary skill in the art.

[1138] Not to be bound by any theory, the lipid-like compounds of structure XXIII facilitate delivery of pharmaceutical agents by forming complexes, e.g., nanocomplexes and microparticles. The hydrophilic head of such a lipid-like compound, positively or negatively charged, binds to a moiety of a pharmaceutical agent that is oppositely charged and its hydrophobic moiety binds to a hydrophobic moiety of the pharmaceutical agent. Either binding can be covalent or non-covalent.

[1139] The above described complexes can be prepared using procedures described in publications such as Wang et al., ACS Synthetic Biology, 1, 403-07 (2012). Generally, they are obtained by incubating a lipid-like compound and a pharmaceutical agent in a buffer such as a sodium acetate buffer or a phosphate buffered saline (“PBS”).

### Hydrophilic Groups

[1140] In certain embodiments, the selected hydrophilic functional group or moiety may alter or otherwise impart properties to the compound or to the transfer vehicle of which such compound is a component (e.g., by improving the transfection efficiencies of a lipid nanoparticle of which the compound is a component). For example, the incorporation of guanidinium as a hydrophilic head-group in the compounds disclosed herein may promote the fusogenicity of such compounds (or of the transfer vehicle of which such compounds are a component) with the cell membrane of one or more target cells, thereby enhancing, for example, the transfection efficiencies of such compounds. It has been hypothesized that the nitrogen from the hydrophilic guanidinium moiety forms a six-membered ring transition state which grants stability to the interaction and thus allows for cellular uptake of encapsulated materials. (Wender, et al., Adv. Drug Del. Rev. (2008) 60: 452-472.) Similarly, the incorporation of one or more amino groups or moieties into the disclosed compounds (e.g., as a head-group) may further promote disruption of the endosomal/lysosomal membrane of the target cell by exploiting the fusogenicity of such amino groups. This is based not only on the pKa of the amino group of the composition, but also on the ability of the amino group to undergo a hexagonal phase transition and fuse with the target cell surface, i.e. the vesicle membrane. (Koltover, et al. Science (1998) 281: 78-81.) The result is believed to promote the disruption of the vesicle membrane and release of the lipid nanoparticle contents into the target cell.

[1141] Similarly, in certain embodiments the incorporation of, for example, imidazole as a hydrophilic head-group in the compounds disclosed herein may serve to promote endosomal or lysosomal release of, for example, contents that are encapsulated in a transfer vehicle (e.g., lipid nanoparticle) of the invention. Such enhanced release may be achieved by one or both of a proton-sponge mediated disruption mechanism and/or an enhanced fusogenicity mechanism. The proton-sponge mechanism is based on the ability of a compound, and in particular a functional moiety or group of the compound, to buffer the acidification of the endosome. This may be manipulated or otherwise controlled by the pKa of the compound or of one or more of the functional groups comprising such compound (e.g., imidazole). Accordingly, in certain embodiments the fusogenicity of, for example, the imidazole-based compounds disclosed herein (e.g., HGT4001 and HGT4004) are related to the endosomal disruption properties, which are facilitated by such imidazole groups, which have a lower pKa relative to other traditional ionizable lipids. Such endosomal disruption properties in turn promote osmotic swelling and the disruption of the liposomal membrane, followed by the transfection or intracellular release of the polynucleotide materials loaded or encapsulated therein into the target cell. This phenomenon can be applicable to a variety of compounds with desirable pKa profiles in addition to an imidazole moiety. Such embodiments also include multi-nitrogen based functionalities such as polyamines, polypeptide (histidine), and nitrogen-based dendritic structures.

[1142] Exemplary ionizable and/or cationic lipids are described in International PCT patent publications WO2015/095340, WO2015/199952, WO2018/011633, WO2017/049245, WO2015/061467, WO2012/040184, WO2012/000104, WO2015/074085, WO2016/081029, WO2017/004143, WO2017/075531, WO2017/117528, WO2011/022460, WO2013/148541, WO2013/116126, WO2011/153120, WO2012/044638, WO2012/054365, WO2011/090965, WO2013/016058, WO2012/162210, WO2008/042973, WO2010/129709, WO2010/144740, WO20 12/099755, WO2013/049328, WO2013/086322, WO2013/086373, WO2011/071860, WO2009/132131, WO2010/048536, WO2010/088537, WO2010/054401, WO2010/054406, WO2010/054405, WO2010/054384, WO2012/016184, WO2009/086558, WO2010/042877, WO2011/000106, WO2011/000107, WO2005/120152, WO2011/141705, WO2013/126803, WO2006/007712, WO2011/038160, WO2005/121348, WO2011/066651, WO2009/127060, WO2011/141704, WO2006/069782, WO2012/031043, WO2013/006825, WO2013/033563, WO2013/089151, WO2017/099823, WO2015/095346, and WO2013/086354, and US patent publications US2016/0311759, US2015/0376115, US2016/0151284, US2017/0210697, US2015/0140070, US2013/0178541, US2013/0303587, US2015/0141678, US2015/0239926, US2016/0376224, US2017/0119904, US2012/0149894, US2015/0057373, US2013/0090372, US2013/0274523, US2013/0274504, US2013/0274504, US2009/0023673, US2012/0128760, US2010/0324120, US2014/0200257, US2015/0203446, US2018/0005363, US2014/0308304, US2013/0338210, US2012/0101148, US2012/0027796, US2012/0058144, US2013/0323269, US2011/0117125, US2011/0256175, US2012/0202871, US2011/0076335, US2006/0083780, US2013/0123338, US2015/0064242, US2006/0051405, US2013/0065939, US2006/0008910, US2003/0022649, US2010/0130588, US2013/0116307, US2010/0062967, US2013/0202684, US2014/0141070, US2014/0255472, US2014/0039032, US2018/0028664, US2016/0317458, and US2013/0195920, the contents of all of which are incorporated herein by reference in their entirety. International patent application WO 2019/131770 is also incorporated herein by reference in its entirety.

### 8. PEG Lipids

[1143] The use and inclusion of polyethylene glycol (PEG)-modified phospholipids and derivatized lipids such as derivatized ceramides (PEG-CER), including N-Octanoyl-Sphingosine-1-[Succinyl(Methoxy Polyethylene Glycol)-2000] (C8 PEG-2000 ceramide) in the liposomal and pharmaceutical compositions described herein is contemplated, preferably in combination with one or more of the compounds and lipids disclosed herein. Contemplated PEG-modified lipids include, but are not limited to, a polyethylene glycol chain of up to 5 kDa in length covalently attached to a lipid with alkyl chain(s) of C6-C20 length. In some embodiments, the PEG-modified lipid employed in the compositions and methods of the invention is 1,2-dimyristoyl-sn-glycerol, methoxypolyethylene Glycol (2000 MW PEG) “DMG-PEG2000.” The addition of PEG-modified lipids to the lipid delivery vehicle may prevent complex aggregation and may also provide a means for increasing circulation lifetime and increasing the delivery of the lipid-polynucleotide composition to the target tissues, (Klibanov et al. (1990) FEBS Letters, 268 (1): 235-237), or they may be selected to rapidly exchange out of the formulation in vivo (see U.S. Pat. No. 5,885,613). Particularly useful exchangeable lipids are PEG-ceramides having shorter acyl chains (e.g., C14 or C18). The PEG-modified phospholipid and derivatized lipids of the present invention may comprise a molar ratio from about 0% to about 20%, about 0.5% to about 20%, about 1% to about 15%, about 4% to about 10%, or about 2% of the total lipid present in a liposomal lipid nanoparticle.

[1144] In an embodiment, a PEG-modified lipid is described in International Pat. Appl. No. PCT/US2019/015913, which is incorporated herein by reference in their entirety. In an embodiment, a transfer vehicle comprises one or more PEG-modified lipids.

[1145] Non-limiting examples of PEG-modified lipids include PEG-modified phosphatidylethanolamines and phosphatidic acids, PEG-ceramide conjugates (e.g., PEG-CerC14 or PEG-CerC20), PEG-modified dialkylamines and PEG-modified 1,2-diacyloxypropan-3-amines. In some further embodiments, a PEG-modified lipid may be, e.g., PEG-c-DOMG, PEG-DMG, PEG-DLPE, PEG-DMPE, PEG-DPPC, or a PEG-DSPE.

[1146] In some still further embodiments, the PEG-modified lipid includes, but is not limited to 1,2-dimyristoyl-sn-glycerol methoxypolyethylene glycol (PEG-DMG), 1,2-distearoyl-sn-glycero-3-phosphoethanolamine-N-[amino(polyethylene glycol)] (PEG-DSPE), PEG-disteryl glycerol (PEG-DSG), PEG-dipalmetoleyl, PEG-dioleyl, PEG-distearyl, PEG-diacylglycamide (PEG-DAG), PEG-dipalmitoyl phosphatidylethanolamine (PEG-DPPE), or PEG-1,2-dimyristyloxlpropyl-3-amine (PEG-c-DMA).

[1147] In various embodiments, a PEG-modified lipid may also be referred to as “PEGylated lipid” or “PEG-lipid.”

[1148] In one embodiment, the PEG-lipid is selected from the group consisting of a PEG-modified phosphatidylethanolamine, a PEG-modified phosphatidic acid, a PEG-modified ceramide, a PEG-modified dialkylamine, a PEG-modified diacylglycerol, a PEG-modified dialkylglycerol, and mixtures thereof.

[1149] In some embodiments, the lipid moiety of the PEG-lipids includes those having lengths of from about C₁₄ to about C₂₂, such as from about C₁₄ to about C₁₆. In some embodiments, a PEG moiety, for example a mPEG-NH₂, has a size of about 1000, about 2000, about 5000, about 10,000, about 15,000 or about 20,000 daltons. In one embodiment, the PEG-lipid is PEG2k-DMG.

[1150] In one embodiment, the lipid nanoparticles described herein can comprise a lipid modified with a non-diffusible PEG. Non-limiting examples of non-diffusible PEGs include PEG-DSG and PEG-DSPE.

[1151] PEG-lipids are known in the art, such as those described in U.S. Pat. No. 8,158,601 and International Pat. Publ. No. WO2015/130584 A2, which are incorporated herein by reference in their entirety.

[1152] In various embodiments, lipids (e.g., PEG-lipids), described herein may be synthesized as described International Pat. Publ. No. PCT/US2016/000129, which is incorporated by reference in its entirety.

[1153] The lipid component of a lipid nanoparticle composition may include one or more molecules comprising polyethylene glycol, such as PEG or PEG-modified lipids. Such species may be alternately referred to as PEGylated lipids. A PEG lipid is a lipid modified with polyethylene glycol. A PEG lipid may be selected from the non-limiting group including PEG-modified phosphatidylethanolamines, PEG-modified phosphatidic acids, PEG-modified ceramides, PEG-modified dialkylamines, PEG-modified diacylglycerols, PEG-modified dialkylglycerols, and mixtures thereof. For example, a PEG lipid may be PEG-c-DOMG, PEG-DMG, PEG-DLPE, PEG-DMPE, PEG-DPPC, or a PEG-DSPE lipid.

[1154] In some embodiments the PEG-modified lipids are a modified form of PEG-DMG. PEG-DMG has the following structure:

[chemical structure]

[1155] In some embodiments the PEG-modified lipids are a modified form of PEG-C18, or PEG-1. PEG-1 has the following structure

[chemical structure]

[1156] In one embodiment, PEG lipids useful in the present invention can be PEGylated lipids described in International Publication No. WO2012099755, the contents of which is herein incorporated by reference in its entirety. Any of these exemplary PEG lipids described herein may be modified to comprise a hydroxyl group on the PEG chain. In certain embodiments, the PEG lipid is a PEG-OH lipid. In certain embodiments, the PEG-OH lipid includes one or more hydroxyl groups on the PEG chain. In certain embodiments, a PEG-OH or hydroxy-PEGylated lipid comprises an —OH group at the terminus of the PEG chain. Each possibility represents a separate embodiment of the present invention.

[1157] In some embodiments, the PEG lipid is a compound of Formula (P1):

[chemical structure]

[1158] or a salt or isomer thereof, wherein:
[1159] r is an integer between 1 and 100;
[1160] R is C₁₀₋₄₀ alkyl, C₁₀₋₄₀ alkenyl, or C₁₀₋₄₀ alkynyl; and optionally one or more methylene groups of R are independently replaced with C₃₋₁₀ carbocyclylene, 4 to 10 membered heterocyclylene, C₆₋₁₀ arylene, 4 to 10 membered heteroarylene, —N(R^{N})—, —O—, —S—, —C(O)—, —C(O)N(R^{N})—, —NR^{N}C(O)—, —NR^{N}C(O)N(R^{N})—, —C(O)O—, —OC(O)—, —OC(O)O—, —OC(O)N(R^{N})—, —NR^{N}C(O)O—, —C(O)S—, —SC(O)—, —C(═NR^{N})—, —C(═NR^{N})N(R^{N})—, —NR^{N}C(═NR^{N})—, —NR^{N}C(═NR^{N})N(R^{N})—, —C(S)—, —C(S)N(R^{N})—, —NR^{N}C(S)—, —NR^{N}C(S)N(R^{N})—, —S(O)—, —OS(O)—, —S(O)O—, —OS(O)O—, —OS(O)₂—, —S(O)₂O—, —OS(O)₂O—, —N(R^{N})S(O)—, —S(O)N(R^{N})—, —N(R^{N})S(O)N(R^{N})—, —OS(O)N(R^{N})—, —N(R^{N})S(O)O—, —S(O)₂—, —N(R^{N})S(O)₂—, —S(O)₂N(R^{N})—, —N(R^{N})S(O)₂N(R^{N})—, —OS(O)₂N(R^{N})—, or —N(R^{N})S(O)₂O—; and each instance of R^{N} is independently hydrogen, C₁₋₆ alkyl, or a nitrogen protecting group.

[1161] For example, R is C₁₇ alkyl. For example, the PEG lipid is a compound of Formula (P1-a):

[chemical structure]

or a salt or isomer thereof, wherein r is an integer between 1 and 100.

[1162] For example, the PEG lipid is a compound of the following formula:

[chemical structure]

### 9. Helper Lipids

[1163] In some embodiments, the transfer vehicle (e.g., LNP) described herein comprises one or more non-cationic helper lipids. In some embodiments, the helper lipid is a phospholipid. In some embodiments, the helper lipid is a phospholipid substitute or replacement. In some embodiments, the phospholipid or phospholipid substitute can be, for example, one or more saturated or (poly)unsaturated phospholipids, or phospholipid substitutes, or a combination thereof. In general, phospholipids comprise a phospholipid moiety and one or more fatty acid moieties.

[1164] A phospholipid moiety can be selected, for example, from the non-limiting group consisting of phosphatidyl choline, phosphatidyl ethanolamine, phosphatidyl glycerol, phosphatidyl serine, phosphatidic acid, 2-lysophosphatidyl choline, and a sphingomyelin.

[1165] A fatty acid moiety can be selected, for example, from the non-limiting group consisting of lauric acid, myristic acid, myristoleic acid, palmitic acid, palmitoleic acid, stearic acid, oleic acid, linoleic acid, alpha-linolenic acid, erucic acid, phytanoic acid, arachidic acid, arachidonic acid, eicosapentaenoic acid, behenic acid, docosapentaenoic acid, and docosahexaenoic acid.

[1166] Phospholipids include, but are not limited to, glycerophospholipids such as phosphatidylcholines, phosphatidylethanolamines, phosphatidylserines, phosphatidylinositols, phosphatidy glycerols, and phosphatidic acids. Phospholipids also include phosphosphingolipid, such as sphingomyelin.

[1167] In some embodiments, the helper lipid is a 1,2-distearoyl-177-glycero-3-phosphocholine (DSPC) analog, a DSPC substitute, oleic acid, or an oleic acid analog.

[1168] In some embodiments, a helper lipid is a non-phosphatidyl choline (PC) zwitterionic lipid, a DSPC analog, oleic acid, an oleic acid analog, or a DSPC substitute.

[1169] In some embodiments, a helper lipid is described in PCT/US2018/053569. Helper lipids suitable for use in a lipid composition of the disclosure include, for example, a variety of neutral, uncharged or zwitterionic lipids. Such helper lipids are preferably used in combination with one or more of the compounds and lipids disclosed herein. Examples of helper lipids include, but are not limited to, 5-heptadecylbenzene-1,3-diol (resorcinol), dipalmitoylphosphatidylcholine (DPPC), distearoylphosphatidylcholine (DSPC), pohsphocholine (DOPC), dimyristoylphosphatidylcholine (DMPC), phosphatidylcholine (PLPC), 1,2-distearoylsn-glycero-3-phosphocholine (DAPC), phosphatidylethanolamine (PE), egg phosphatidylcholine (EPC), dilauryloylphosphatidylcholine (DLPC), dimyristoylphosphatidylcholine (DMPC), 1-myristoyl-2-palmitoyl phosphatidylcholine (MPPC), 1-paimitoyl-2-myristoyl phosphatidylcholine (PMPC), 1-palmitoyl-2-stearoyl phosphatidylcholine (PSPC), 1,2-diarachidoyl-sn-glycero-3-phosphocholine (DBPC), 1-stearoyl-2-palmitoyl phosphatidylcholine (SPPC), 1,2-dieicosenoyl-sn-glycero-3-phosphocholine (DEPC), paimitoyioieoyl phosphatidylcholine (POPC), lysophosphatidyl choline, dioleoyl phosphatidylethanol amine (DOPE) dilinoleoylphosphatidylcholine distearoylphosphatidylethanolamine (DSPE), dimyristoyl phosphatidylethanolamine (DMPE), dipalmitoyl phosphatidylethanolamine (DPPE), palmitoyloleoyl phosphatidylethanolamine (POPE), lysophosphatidylethanolamine and combinations thereof. In one embodiment, the helper lipid may be distearoylphosphatidylcholine (DSPC) or dimyristoyl phosphatidyl ethanolamine (DMPE). In another embodiment, the helper lipid may be distearoylphosphatidylcholine (DSPC). Helper lipids function to stabilize and improve processing of the transfer vehicles. Such helper lipids are preferably used in combination with other excipients, for example, one or more of the ionizable lipids disclosed herein. In some embodiments, when used in combination with an ionizable lipid, the helper lipid may comprise a molar ratio of 5% to about 90%, or about 10% to about 70% of the total lipid present in the lipid nanoparticle.

### 10. Structural Lipids

[1170] In an embodiment, a structural lipid is described in international patent application PCT/US2019/015913.

[1171] The transfer vehicles described herein comprise one or more structural lipids. Incorporation of structural lipids in the lipid nanoparticle may help mitigate aggregation of other lipids in the particle. Structural lipids can include, but are not limited to, cholesterol, fecosterol, ergosterol, bassicasterol, tomatidine, tomatine, ursolic, alpha-tocopherol, and mixtures thereof. In certain embodiments, the structural lipid is cholesterol. In certain embodiments, the structural lipid includes cholesterol and a corticosteroid (such as, for example, prednisolone, dexamethasone, prednisone, and hydrocortisone), or a combination thereof.

[1172] In some embodiments, the structural lipid is a sterol. In certain embodiments, the structural lipid is a steroid. In certain embodiments, the structural lipid is cholesterol. In certain embodiments, the structural lipid is an analog of cholesterol. In certain embodiments, the structural lipid is alpha-tocopherol.

[1173] The transfer vehicles described herein comprise one or more structural lipids. Incorporation of structural lipids in a transfer vehicle, e.g., a lipid nanoparticle, may help mitigate aggregation of other lipids in the particle. In certain embodiments, the structural lipid includes cholesterol and a corticosteroid (such as, for example, prednisolone, dexamethasone, prednisone, and hydrocortisone), or a combination thereof.

[1174] In some embodiments, the structural lipid is a sterol. Structural lipids can include, but are not limited to, sterols (e.g., phytosterols or zoosterols).

[1175] In certain embodiments, the structural lipid is a steroid. For example, sterols can include, but are not limited to, cholesterol, β-sitosterol, fecosterol, ergosterol, sitosterol, campesterol, stigmasterol, brassicasterol, ergosterol, tomatidine, tomatine, ursolic acid, or alpha-tocopherol.

[1176] In some embodiments, a transfer vehicle includes an effective amount of an immune cell delivery potentiating lipid, e.g., a cholesterol analog or an amino lipid or combination thereof, that, when present in a transfer vehicle, e.g., an lipid nanoparticle, may function by enhancing cellular association and/or uptake, internalization, intracellular trafficking and/or processing, and/or endosomal escape and/or may enhance recognition by and/or binding to immune cells, relative to a transfer vehicle lacking the immune cell delivery potentiating lipid. Accordingly, while not intending to be bound by any particular mechanism or theory, in one embodiment, a structural lipid or other immune cell delivery potentiating lipid of the disclosure binds to C1q or promotes the binding of a transfer vehicle comprising such lipid to C1q. Thus, for in vitro use of the transfer vehicles of the disclosure for delivery of a nucleic acid molecule to an immune cell, culture conditions that include C1q are used (e.g., use of culture media that includes serum or addition of exogenous C1q to serum-free media). For in vivo use of the transfer vehicles of the disclosure, the requirement for C1q is supplied by endogenous C1q.

[1177] In certain embodiments, the structural lipid is cholesterol. In certain embodiments, the structural lipid is an analog of cholesterol. In some embodiments, the structural lipid is a lipid in Table 16: Table 16

TABLE 16

| CMPD | |
|---|---|
| No. S- | Structure |
| 1 | [chemical structure] |
| 22 | [chemical structure] |
| 2 | [chemical structure] |
| 3 | [chemical structure] |
| 4 | [chemical structure] |
| 5 | [chemical structure] |
| 6 | [chemical structure] |
| 7 | [chemical structure] |
| 23 | [chemical structure] |
| 24 | [chemical structure] |
| 25 | [chemical structure] |
| 26 | [chemical structure] |
| 27 | [chemical structure] |
| 28 | [chemical structure] |
| 8 | [chemical structure] |
| 9 | [chemical structure] |
| 10 | [chemical structure] |
| 11 | [chemical structure] |
| 12 | [chemical structure] |
| 13 | [chemical structure] |
| 29 | [chemical structure] |
| 30 | [chemical structure] |
| 31 | [chemical structure] |
| 32 | [chemical structure] |
| 33 | [chemical structure] |
| 34 | [chemical structure] |
| 14 | [chemical structure] |
| 15 | [chemical structure] |
| 16 | [chemical structure] |
| 17 | [chemical structure] |
| 18 | [chemical structure] |
| 19 | [chemical structure] |
| 35 | [chemical structure] |
| 36 | [chemical structure] |
| 37 | [chemical structure] |
| 38 | [chemical structure] |
| 39 | [chemical structure] |
| 40 | [chemical structure] |
| 20 | [chemical structure] |
| 21 | [chemical structure] |
| 150 | [chemical structure] |
| 154 | [chemical structure] |
| 162 | [chemical structure] |
| 41 | [chemical structure] |
| 42 | [chemical structure] |
| 165 | [chemical structure] |
| 169 | [chemical structure] |
| 170 | [chemical structure] |
| 163 | [chemical structure] |
| 164 | [chemical structure] |
| 184 | [chemical structure] |
| 171 | [chemical structure] |
| 172 | [chemical structure] |
| 43 | [chemical structure] |
| 47 | [chemical structure] |
| 44 | [chemical structure] |
| 45 | [chemical structure] |
| 46 | [chemical structure] |
| 175 | [chemical structure] |
| 176 | [chemical structure] |
| 48 | [chemical structure] |
| 49 | [chemical structure] |
| 50 | [chemical structure] |
| 177 | [chemical structure] |
| 178 | [chemical structure] |
| 51 | [chemical structure] |
| 52 | [chemical structure] |
| 53 | [chemical structure] |
| 54 | [chemical structure] |
| 55 | [chemical structure] |
| 56 | [chemical structure] |
| 57 | [chemical structure] |
| 60 | [chemical structure] |
| 61 | [chemical structure] |
| 62 | [chemical structure] |
| 63 | [chemical structure] |
| 64 | [chemical structure] |
| 65 | [chemical structure] |
| 66 | [chemical structure] |
| 58 | [chemical structure] |
| 59 | [chemical structure] |
| 153 | [chemical structure] |
| 67 | [chemical structure] |
| 149 | [chemical structure] |
| 68 | [chemical structure] |
| 69 | [chemical structure] |
| 71 | [chemical structure] |
| 72 | [chemical structure] |
| 70 | [chemical structure] |
| 73 | [chemical structure] |
| 74 | [chemical structure] |
| 75 | [chemical structure] |
| 76 | [chemical structure] |
| 77 | [chemical structure] |
| 78 | [chemical structure] |
| 79 | [chemical structure] |
| 80 | [chemical structure] |
| 81 | [chemical structure] |
| 82 | [chemical structure] |
| 83 | [chemical structure] |
| 84 | [chemical structure] |
| 85 | [chemical structure] |
| 86 | [chemical structure] |
| 87 | [chemical structure] |
| 152 | [chemical structure] |
| 157 | [chemical structure] |
| 88 | [chemical structure] |
| 89 | [chemical structure] |
| 90 | [chemical structure] |
| 91 | [chemical structure] |
| 93 | [chemical structure] |
| 94 | [chemical structure] |
| 95 | [chemical structure] |
| 96 | [chemical structure] |
| 92 | [chemical structure] |
| 97 | [chemical structure] |
| 98 | [chemical structure] |
| 99 | [chemical structure] |
| 100 | [chemical structure] |
| 101 | [chemical structure] |
| 102 | [chemical structure] |
| 103 | [chemical structure] |
| 104 | [chemical structure] |
| 105 | [chemical structure] |
| 180 | [chemical structure] |
| 181 | [chemical structure] |
| 182 | [chemical structure] |
| 106 | [chemical structure] |
| 107 | [chemical structure] |
| 108 | [chemical structure] |
| 109 | [chemical structure] |
| 110 | [chemical structure] |
| 121 | [chemical structure] |
| 111 | [chemical structure] |
| 112 | [chemical structure] |
| 113 | [chemical structure] |
| 114 | [chemical structure] |
| 115 | [chemical structure] |
| 116 | [chemical structure] |
| 117 | [chemical structure] |
| 122 | [chemical structure] |
| 123 | [chemical structure] |
| 124 | [chemical structure] |
| 125 | [chemical structure] |
| 126 | [chemical structure] |
| 127 | [chemical structure] |
| 128 | [chemical structure] |
| 118 | [chemical structure] |
| 119 | [chemical structure] |
| 120 | [chemical structure] |
| 156 | [chemical structure] |
| 158 | [chemical structure] |
| 160 | [chemical structure] |
| 129 | [chemical structure] |
| 130 | [chemical structure] |
| 155 | [chemical structure] |
| 167 | [chemical structure] |
| 168 | [chemical structure] |
| 173 | [chemical structure] |
| 161 | [chemical structure] |
| 166 | [chemical structure] |
| 174 | [chemical structure] |
| 179 | [chemical structure] |
| 131 | [chemical structure] |
| 132 | [chemical structure] |
| 133 | [chemical structure] |
| 134 | [chemical structure] |
| 135 | [chemical structure] |
| 136 | [chemical structure] |
| 137 | [chemical structure] |
| 138 | [chemical structure] |
| 139 | [chemical structure] |
| 140 | [chemical structure] |
| 142 | [chemical structure] |
| 143 | [chemical structure] |
| 144 | [chemical structure] |
| 145 | [chemical structure] |
| 146 | [chemical structure] |
| 147 | [chemical structure] |
| 148 | [chemical structure] |
| 141 | [chemical structure] |
| 159 | [chemical structure] |
| 151 | [chemical structure] |
| Composition | |
| S- No. | Structure |
| 183 | [chemical structure] |
| | Compound 141 |
| | [chemical structure] |
| | Compound 140 |
| | [chemical structure] |
| | Compound 143 |
| | [chemical structure] |
| | Compound 148 |

### 11. LNP Formulations

[1178] The formation of a lipid nanoparticle (LNP) described herein may be accomplished by any methods known in the art. For example, as described in U.S. Pat. Pub. No. US2012/0178702 A1, which is incorporated herein by reference in its entirety. Non-limiting examples of lipid nanoparticle compositions and methods of making them are described, for example, in Semple et al. (2010) Nat. Biotechnol. 28:172-176; Jayarama et al. (2012), Angew. Chem. Int. Ed., 51:8529-8533; and Maier et al. (2013) Molecular Therapy 21, 1570-1578 (the contents of each of which are incorporated herein by reference in their entirety).

[1179] In one embodiment, the LNP formulation may be prepared by, e.g., the methods described in International Pat. Pub. No. WO 2011/127255 or WO 2008/103276, the contents of each of which are herein incorporated by reference in their entirety.

[1180] In one embodiment, LNP formulations described herein may comprise a polycationic composition. As a non-limiting example, the polycationic composition may be a composition selected from Formulae 1-60 of U.S. Pat. Pub. No. US2005/0222064 A1, the content of which is herein incorporated by reference in its entirety.

[1181] In one embodiment, the lipid nanoparticle may be formulated by the methods described in U.S. Pat. Pub. No. US2013/0156845 A1, and International Pat. Pub. No. WO2013/093648 A2 or WO2012/024526 A2, each of which is herein incorporated by reference in its entirety.

[1182] In one embodiment, the lipid nanoparticles described herein may be made in a sterile environment by the system and/or methods described in U.S. Pat. Pub. No. US2013/0164400 A1, which is incorporated herein by reference in its entirety.

[1183] In one embodiment, the LNP formulation may be formulated in a nanoparticle such as a nucleic acid-lipid particle described in U.S. Pat. No. 8,492,359, which is incorporated herein by reference in its entirety.

[1184] A nanoparticle composition may optionally comprise one or more coatings. For example, a nanoparticle composition may be formulated in a capsule, film, or tablet having a coating. A capsule, film, or tablet including a composition described herein may have any useful size, tensile strength, hardness, or density.

[1185] In some embodiments, the lipid nanoparticles described herein may be synthesized using methods comprising microfluidic mixers. Exemplary microfluidic mixers may include, but are not limited to, a slit interdigitial micromixer including, but not limited to, those manufactured by Precision Nanosystems (Vancouver, BC, Canada), Microinnova (Allerheiligen bei Wildon, Austria) and/or a staggered herringbone micromixer (SHM) (Zhigaltsev, I. V. et al. (2012) Langmuir. 28:3633-40; Belliveau, N. M. et al. Mol. Ther. Nucleic. Acids. (2012) 1:e37; Chen, D. et al. J. Am. Chem. Soc. (2012) 134(16):6948-51; each of which is herein incorporated by reference in its entirety).

[1186] In some embodiments, methods of LNP generation comprising SHM, further comprise the mixing of at least two input streams wherein mixing occurs by microstructure-induced chaotic advection (MICA). According to this method, fluid streams flow through channels present in a herringbone pattern causing rotational flow and folding the fluids around each other. This method may also comprise a surface for fluid mixing wherein the surface changes orientations during fluid cycling. Methods of generating LNPs using SHM include those disclosed in U.S. Pat. Pub. Nos. US2004/0262223 A1 and US2012/0276209 A1, each of which is incorporated herein by reference in their entirety.

[1187] In one embodiment, the lipid nanoparticles may be formulated using a micromixer such as, but not limited to, a Slit Interdigital Microstructured Mixer (SIMM-V2) or a Standard Slit Interdigital Micro Mixer (SSIMM) or Caterpillar (CPMM) or Impinging-jet (IJMM) from the Institut fur Mikrotechnik Mainz GmbH, Mainz Germany). In one embodiment, the lipid nanoparticles are created using microfluidic technology (see, Whitesides (2006) Nature. 442: 368-373; and Abraham et al. (2002) Science. 295: 647-651; each of which is herein incorporated by reference in its entirety). As a non-limiting example, controlled microfluidic formulation includes a passive method for mixing streams of steady pressure-driven flows in micro channels at a low Reynolds number (see, e.g., Abraham et al. (2002) Science. 295: 647651; which is herein incorporated by reference in its entirety).

[1188] In one embodiment, the circRNA of the present invention may be formulated in lipid nanoparticles created using a micromixer chip such as, but not limited to, those from Harvard Apparatus (Holliston, MA), Dolomite Microfluidics (Royston, UK), or Precision Nanosystems (Van Couver, BC, Canada). A micromixer chip can be used for rapid mixing of two or more fluid streams with a split and recombine mechanism.

[1189] In one embodiment, the lipid nanoparticles may have a diameter from about 10 to about 100 nm such as, but not limited to, about 10 to about 20 nm, about 10 to about 30 nm, about 10 to about 40 nm, about 10 to about 50 nm, about 10 to about 60 nm, about 10 to about 70 nm, about 10 to about 80 nm, about 10 to about 90 nm, about 20 to about 30 nm, about 20 to about 40 nm, about 20 to about 50 nm, about 20 to about 60 nm, about 20 to about 70 nm, about 20 to about 80 nm, about 20 to about 90 nm, about 20 to about 100 nm, about 30 to about 40 nm, about 30 to about 50 nm, about 30 to about 60 nm, about 30 to about 70 nm, about 30 to about 80 nm, about 30 to about 90 nm, about 30 to about 100 nm, about 40 to about 50 nm, about 40 to about 60 nm, about 40 to about 70 nm, about 40 to about 80 nm, about 40 to about 90 nm, about 40 to about 100 nm, about 50 to about 60 nm, about 50 to about 70 nm about 50 to about 80 nm, about 50 to about 90 nm, about 50 to about 100 nm, about 60 to about 70 nm, about 60 to about 80 nm, about 60 to about 90 nm, about 60 to about 100 nm, about 70 to about 80 nm, about 70 to about 90 nm, about 70 to about 100 nm, about 80 to about 90 nm, about 80 to about 100 nm and/or about 90 to about 100 nm. In one embodiment, the lipid nanoparticles may have a diameter from about 10 to 500 nm. In one embodiment, the lipid nanoparticle may have a diameter greater than 100 nm, greater than 150 nm, greater than 200 nm, greater than 250 nm, greater than 300 nm, greater than 350 nm, greater than 400 nm, greater than 450 nm, greater than 500 nm, greater than 550 nm, greater than 600 nm, greater than 650 nm, greater than 700 nm, greater than 750 nm, greater than 800 nm, greater than 850 nm, greater than 900 nm, greater than 950 nm or greater than 1000 nm. Each possibility represents a separate embodiment of the present invention.

[1190] In some embodiments, a nanoparticle (e.g., a lipid nanoparticle) has a mean diameter of 10-500 nm, 20-400 nm, 30-300 nm, or 40-200 nm. In some embodiments, a nanoparticle (e.g., a lipid nanoparticle) has a mean diameter of 50-150 nm, 50-200 nm, 80-100 nm, or 80-200 nm.

[1191] In some embodiments, the lipid nanoparticles described herein can have a diameter from below 0.1 μm to up to 1 mm such as, but not limited to, less than 0.1 μm, less than 1.0 μm, less than 5 μm, less than 10 μm, less than 15 μm, less than 20 μm, less than 25 μm, less than 30 μm, less than 35 μm, less than 40 μm, less than 50 μm, less than 55 μm, less than 60 μm, less than 65 μm, less than 70 μm, less than 75 μm, less than 80 μm, less than 85 μm, less than 90 μm, less than 95 μm, less than 100 μm, less than 125 μm, less than 150 μm, less than 175 μm, less than 200 μm, less than 225 μm, less than 250 μm, less than 275 μm, less than 300 μm, less than 325 μm, less than 350 μm, less than 375 μm, less than 400 μm, less than 425 μm, less than 450 μm, less than 475 μm, less than 500 μm, less than 525 μm, less than 550 μm, less than 575 μm, less than 600 μm, less than 625 μm, less than 650 μm, less than 675 μm, less than 700 μm, less than 725 μm, less than 750 μm, less than 775 μm, less than 800 μm, less than 825 μm, less than 850 μm, less than 875 μm, less than 900 μm, less than 925 μm, less than 950 μm, less than 975 μm.

[1192] In another embodiment, LNPs may have a diameter from about 1 nm to about 100 nm, from about 1 nm to about 10 nm, about 1 nm to about 20 nm, from about 1 nm to about 30 nm, from about 1 nm to about 40 nm, from about 1 nm to about 50 nm, from about 1 nm to about 60 nm, from about 1 nm to about 70 nm, from about 1 nm to about 80 nm, from about 1 nm to about 90 nm, from about 5 nm to about from 100 nm, from about 5 nm to about 10 nm, about 5 nm to about 20 nm, from about 5 nm to about 30 nm, from about 5 nm to about 40 nm, from about 5 nm to about 50 nm, from about 5 nm to about 60 nm, from about 5 nm to about 70 nm, from about 5 nm to about 80 nm, from about 5 nm to about 90 nm, about 10 to about 50 nM, from about 20 to about 50 nm, from about 30 to about 50 nm, from about 40 to about 50 nm, from about 20 to about 60 nm, from about 30 to about 60 nm, from about 40 to about 60 nm, from about 20 to about 70 nm, from about 30 to about 70 nm, from about 40 to about 70 nm, from about 50 to about 70 nm, from about 60 to about 70 nm, from about 20 to about 80 nm, from about 30 to about 80 nm, from about 40 to about 80 nm, from about 50 to about 80 nm, from about 60 to about 80 nm, from about 20 to about 90 nm, from about 30 to about 90 nm, from about 40 to about 90 nm, from about 50 to about 90 nm, from about 60 to about 90 nm and/or from about 70 to about 90 nm. Each possibility represents a separate embodiment of the present invention.

[1193] A nanoparticle composition may be relatively homogenous. A polydispersity index may be used to indicate the homogeneity of a nanoparticle composition, e.g., the particle size distribution of the nanoparticle compositions. A small (e.g., less than 0.3) polydispersity index generally indicates a narrow particle size distribution. A nanoparticle composition may have a polydispersity index from about 0 to about 0.25, such as 0.01, 0.02, 0.03, 0.04, 0.05, 0.06, 0.07, 0.08, 0.09, 0.10, 0.1 1, 0.12, 0.13, 0.14, 0.15, 0.16, 0.17, 0.18, 0.19, 0.20, 0.21, 0.22, 0.23, 0.24, or 0.25. In some embodiments, the polydispersity index of a nanoparticle composition may be from about 0.10 to about 0.20. Each possibility represents a separate embodiment of the present invention.

[1194] The zeta potential of a nanoparticle composition may be used to indicate the electrokinetic potential of the composition. For example, the zeta potential may describe the surface charge of a nanoparticle composition. Nanoparticle compositions with relatively low charges, positive or negative, are generally desirable, as more highly charged species may interact undesirably with cells, tissues, and other elements in the body. In some embodiments, the zeta potential of a nanoparticle composition may be from about −20 mV to about +20 mV, from about −20 mV to about +15 mV, from about −20 mV to about +10 mV, from about −20 mV to about +5 mV, from about −20 mV to about 0 mV, from about −20 mV to about −5 mV, from about −20 mV to about −10 mV, from about −20 mV to about −15 mV from about −20 mV to about +20 mV, from about −20 mV to about +15 mV, from about −20 mV to about +10 mV, from about −20 mV to about +5 mV, from about −20 mV to about 0 mV, from about 0 mV to about +20 mV, from about 0 mV to about +15 mV, from about 0 mV to about +10 mV, from about 0 mV to about +5 mV, from about +5 mV to about +20 mV, from about +5 mV to about +15 mV, or from about +5 mV to about +10 mV. Each possibility represents a separate embodiment of the present invention.

[1195] The efficiency of encapsulation of a therapeutic agent describes the amount of therapeutic agent that is encapsulated or otherwise associated with a nanoparticle composition after preparation, relative to the initial amount provided. The encapsulation efficiency is desirably high (e.g., close to 100%). The encapsulation efficiency may be measured, for example, by comparing the amount of therapeutic agent in a solution containing the nanoparticle composition before and after breaking up the nanoparticle composition with one or more organic solvents or detergents. Fluorescence may be used to measure the amount of free therapeutic agent (e.g., nucleic acids) in a solution. For the nanoparticle compositions described herein, the encapsulation efficiency of a therapeutic agent may be at least 50%, for example 50%, 55%, 60%, 65%, 70%, 75%, 80%, 85%, 90%, 91%, 92%, 93%, 94%, 95%, 96%, 97%, 98%, 99%, or 100%. In some embodiments, the encapsulation efficiency may be at least 80%. In certain embodiments, the encapsulation efficiency may be at least 90%. Each possibility represents a separate embodiment of the present invention. In some embodiments, the lipid nanoparticle has a polydiversity value of less than 0.4. In some embodiments, the lipid nanoparticle has a net neutral charge at a neutral pH. In some embodiments, the lipid nanoparticle has a mean diameter of 50-200 nm.

[1196] The properties of a lipid nanoparticle formulation may be influenced by factors including, but not limited to, the selection of the cationic lipid component, the degree of cationic lipid saturation, the selection of the non-cationic lipid component, the degree of noncationic lipid saturation, the selection of the structural lipid component, the nature of the PEGylation, ratio of all components and biophysical parameters such as size. As described herein, the purity of a PEG lipid component is also important to an LNP's properties and performance.

### 12. Methods

[1197] In one embodiment, a lipid nanoparticle formulation may be prepared by the methods described in International Publication Nos. WO2011127255 or WO2008103276, each of which is herein incorporated by reference in their entirety. In some embodiments, lipid nanoparticle formulations may be as described in International Publication No. WO2019131770, which is herein incorporated by reference in its entirety.

[1198] In some embodiments, circular RNA is formulated according to a process described in U.S. patent application Ser. No. 15/809,680. In some embodiments, the present invention provides a process of encapsulating circular RNA in transfer vehicles comprising the steps of forming lipids into pre-formed transfer vehicles (i.e. formed in the absence of RNA) and then combining the pre-formed transfer vehicles with RNA. In some embodiments, the novel formulation process results in an RNA formulation with higher potency (peptide or protein expression) and higher efficacy (improvement of a biologically relevant endpoint) both in vitro and in vivo with potentially better tolerability as compared to the same RNA formulation prepared without the step of preforming the lipid nanoparticles (e.g., combining the lipids directly with the RNA).

[1199] For certain cationic lipid nanoparticle formulations of RNA, in order to achieve high encapsulation of RNA, the RNA in buffer (e.g., citrate buffer) has to be heated. In those processes or methods, the heating is required to occur before the formulation process (i.e. heating the separate components) as heating post-formulation (post-formation of nanoparticles) does not increase the encapsulation efficiency of the RNA in the lipid nanoparticles. In contrast, in some embodiments of the novel processes of the present invention, the order of heating of RNA does not appear to affect the RNA encapsulation percentage. In some embodiments, no heating (i.e. maintaining at ambient temperature) of one or more of the solutions comprising the pre-formed lipid nanoparticles, the solution comprising the RNA and the mixed solution comprising the lipid nanoparticle encapsulated RNA is required to occur before or after the formulation process.

[1200] RNA may be provided in a solution to be mixed with a lipid solution such that the RNA may be encapsulated in lipid nanoparticles. A suitable RNA solution may be any aqueous solution containing RNA to be encapsulated at various concentrations. For example, a suitable RNA solution may contain an RNA at a concentration of or greater than about 0.01 mg/ml, 0.05 mg/ml, 0.06 mg/ml, 0.07 mg/ml, 0.08 mg/ml, 0.09 mg/ml, 0.1 mg/ml, 0.15 mg/ml, 0.2 mg/ml, 0.3 mg/ml, 0.4 mg/ml, 0.5 mg/ml, 0.6 mg/ml, 0.7 mg/ml, 0.8 mg/ml, 0.9 mg/ml, or 1.0 mg/ml. In some embodiments, a suitable RNA solution may contain an RNA at a concentration in a range from about 0.01-1.0 mg/ml, 0.01-0.9 mg/ml, 0.01-0.8 mg/ml, 0.01-0.7 mg/ml, 0.01-0.6 mg/ml, 0.01-0.5 mg/ml, 0.01-0.4 mg/ml, 0.01-0.3 mg/ml, 0.01-0.2 mg/ml, 0.01-0.1 mg/ml, 0.05-1.0 mg/ml, 0.05-0.9 mg/ml, 0.05-0.8 mg/ml, 0.05-0.7 mg/ml, 0.05-0.6 mg/ml, 0.05-0.5 mg/ml, 0.05-0.4 mg/ml, 0.05-0.3 mg/ml, 0.05-0.2 mg/ml, 0.05-0.1 mg/ml, 0.1-1.0 mg/ml, 0.2-0.9 mg/ml, 0.3-0.8 mg/ml, 0.4-0.7 mg/ml, or 0.5-0.6 mg/ml.

[1201] Typically, a suitable RNA solution may also contain a buffering agent and/or salt. Generally, buffering agents can include HEPES, Tris, ammonium sulfate, sodium bicarbonate, sodium citrate, sodium acetate, potassium phosphate or sodium phosphate. In some embodiments, suitable concentration of the buffering agent may be in a range from about 0.1 mM to 100 mM, 0.5 mM to 90 mM, 1.0 mM to 80 mM, 2 mM to 70 mM, 3 mM to 60 mM, 4 mM to 50 mM, 5 mM to 40 mM, 6 mM to 30 mM, 7 mM to 20 mM, 8 mM to 15 mM, or 9 to 12 mM.

[1202] Exemplary salts can include sodium chloride, magnesium chloride, and potassium chloride. In some embodiments, suitable concentration of salts in an RNA solution may be in a range from about 1 mM to 500 mM, 5 mM to 400 mM, 10 mM to 350 mM, 15 mM to 300 mM, 20 mM to 250 mM, 30 mM to 200 mM, 40 mM to 190 mM, 50 mM to 180 mM, 50 mM to 170 mM, 50 mM to 160 mM, 50 mM to 150 mM, or 50 mM to 100 mM.

[1203] In some embodiments, a suitable RNA solution may have a pH in a range from about 3.5-6.5, 3.5-6.0, 3.5-5.5, 3.5-5.0, 3.5-4.5, 4.0-5.5, 4.0-5.0, 4.0-4.9, 4.0-4.8, 4.0-4.7, 4.0-4.6, or 4.0-4.5.

[1204] Various methods may be used to prepare an RNA solution suitable for the present invention. In some embodiments, RNA may be directly dissolved in a buffer solution described herein. In some embodiments, an RNA solution may be generated by mixing an RNA stock solution with a buffer solution prior to mixing with a lipid solution for encapsulation. In some embodiments, an RNA solution may be generated by mixing an RNA stock solution with a buffer solution immediately before mixing with a lipid solution for encapsulation.

[1205] According to the present invention, a lipid solution contains a mixture of lipids suitable to form transfer vehicles for encapsulation of RNA. In some embodiments, a suitable lipid solution is ethanol based. For example, a suitable lipid solution may contain a mixture of desired lipids dissolved in pure ethanol (i.e. 100% ethanol). In another embodiment, a suitable lipid solution is isopropyl alcohol based. In another embodiment, a suitable lipid solution is dimethylsulfoxide-based. In another embodiment, a suitable lipid solution is a mixture of suitable solvents including, but not limited to, ethanol, isopropyl alcohol and dimethylsulfoxide.

[1206] A suitable lipid solution may contain a mixture of desired lipids at various concentrations. In some embodiments, a suitable lipid solution may contain a mixture of desired lipids at a total concentration in a range from about 0.1-100 mg/ml, 0.5-90 mg/ml, 1.0-80 mg/ml, 1.0-70 mg/ml, 1.0-60 mg/ml, 1.0-50 mg/ml, 1.0-40 mg/ml, 1.0-30 mg/ml, 1.0-20 mg/ml, 1.0-15 mg/ml, 1.0-10 mg/ml, 1.0-9 mg/ml, 1.0-8 mg/ml, 1.0-7 mg/ml, 1.0-6 mg/ml, or 1.0-5 mg/ml.

### 13. Targeting

[1207] The present invention also contemplates the discriminatory targeting of target cells and tissues by both passive and active targeting means. The phenomenon of passive targeting exploits the natural distributions patterns of a transfer vehicle in vivo without relying upon the use of additional excipients or means to enhance recognition of the transfer vehicle by target cells. For example, transfer vehicles which are subject to phagocytosis by the cells of the reticulo-endothelial system are likely to accumulate in the liver or spleen, and accordingly may provide a means to passively direct the delivery of the compositions to such target cells.

[1208] Alternatively, the present invention contemplates active targeting, which involves the use of targeting moieties that may be bound (either covalently or non-covalently) to the transfer vehicle to encourage localization of such transfer vehicle at certain target cells or target tissues. For example, targeting may be mediated by the inclusion of one or more endogenous targeting moieties in or on the transfer vehicle to encourage distribution to the target cells or tissues. Recognition of the targeting moiety by the target tissues actively facilitates tissue distribution and cellular uptake of the transfer vehicle and/or its contents in the target cells and tissues (e.g., the inclusion of an apolipoprotein-E targeting ligand in or on the transfer vehicle encourages recognition and binding of the transfer vehicle to endogenous low density lipoprotein receptors expressed by hepatocytes). As provided herein, the composition can comprise a moiety capable of enhancing affinity of the composition to the target cell. Targeting moieties may be linked to the outer bilayer of the lipid particle during formulation or post-formulation. These methods are well known in the art. In addition, some lipid particle formulations may employ fusogenic polymers such as PEAA, hemagluttinin, other lipopeptides (see U.S. patent application Ser. No. 08/835,281, and 60/083,294, which are incorporated herein by reference) and other features useful for in vivo and/or intracellular delivery. In other some embodiments, the compositions of the present invention demonstrate improved transfection efficacies, and/or demonstrate enhanced selectivity towards target cells or tissues of interest. Contemplated therefore are compositions which comprise one or more moieties (e.g., peptides, aptamers, oligonucleotides, a vitamin or other molecules) that are capable of enhancing the affinity of the compositions and their nucleic acid contents for the target cells or tissues. Suitable moieties may optionally be bound or linked to the surface of the transfer vehicle. In some embodiments, the targeting moiety may span the surface of a transfer vehicle or be encapsulated within the transfer vehicle. Suitable moieties and are selected based upon their physical, chemical or biological properties (e.g., selective affinity and/or recognition of target cell surface markers or features). Cell-specific target sites and their corresponding targeting ligand can vary widely. Suitable targeting moieties are selected such that the unique characteristics of a target cell are exploited, thus allowing the composition to discriminate between target and non-target cells. For example, compositions of the invention may include surface markers (e.g., apolipoprotein-B or apolipoprotein-E) that selectively enhance recognition of, or affinity to hepatocytes (e.g., by receptor-mediated recognition of and binding to such surface markers). As an example, the use of galactose as a targeting moiety would be expected to direct the compositions of the present invention to parenchymal hepatocytes, or alternatively the use of mannose containing sugar residues as a targeting ligand would be expected to direct the compositions of the present invention to liver endothelial cells (e.g., mannose containing sugar residues that may bind preferentially to the asialoglycoprotein receptor present in hepatocytes). (See Hillery A M, et al. “Drug Delivery and Targeting: For Pharmacists and Pharmaceutical Scientists” (2002) Taylor & Francis, Inc.) The presentation of such targeting moieties that have been conjugated to moieties present in the transfer vehicle (e.g., a lipid nanoparticle) therefore facilitate recognition and uptake of the compositions of the present invention in target cells and tissues. Examples of suitable targeting moieties include one or more peptides, proteins, aptamers, vitamins and oligonucleotides.

[1209] In particular embodiments, a transfer vehicle comprises a targeting moiety. In some embodiments, the targeting moiety mediates receptor-mediated endocytosis selectively into a specific population of cells. In some embodiments, the targeting moiety is capable of binding to a T cell antigen. In some embodiments, the targeting moiety is capable of binding to a NK, NKT, or macrophage antigen. In some embodiments, the targeting moiety is capable of binding to a protein selected from the group CD3, CD4, CD8, PD-1, 4-1BB, and CD2. In some embodiments, the targeting moiety is an single chain Fv (scFv) fragment, nanobody, peptide, peptide-based macrocycle, minibody, heavy chain variable region, light chain variable region or fragment thereof. In some embodiments, the targeting moiety is selected from T-cell receptor motif antibodies, T-cell α chain antibodies, T-cell β chain antibodies, T-cell γ chain antibodies, T-cell δ chain antibodies, CCR7 antibodies, CD3 antibodies, CD4 antibodies, CD5 antibodies, CD7 antibodies, CD8 antibodies, CD11b antibodies, CD11c antibodies, CD16 antibodies, CD19 antibodies, CD20 antibodies, CD21 antibodies, CD22 antibodies, CD25 antibodies, CD28 antibodies, CD34 antibodies, CD35 antibodies, CD40 antibodies, CD45RA antibodies, CD45RO antibodies, CD52 antibodies, CD56 antibodies, CD62L antibodies, CD68 antibodies, CD80 antibodies, CD95 antibodies, CD117 antibodies, CD127 antibodies, CD133 antibodies, CD137 (4-1BB) antibodies, CD163 antibodies, F4/80 antibodies, IL-4Rα antibodies, Sca-1 antibodies, CTLA-4 antibodies, GITR antibodies GARP antibodies, LAP antibodies, granzyme B antibodies, LFA-1 antibodies, transferrin receptor antibodies, and fragments thereof. In some embodiments, the targeting moiety is a small molecule binder of an ectoenzyme on lymphocytes. Small molecule binders of ectoenzymes include A2A inhibitors CD73 inhibitors, CD39 or adesines receptors A2aR and A2bR. Potential small molecules include AB928.

[1210] In some embodiments, transfer vehicles are formulated and/or targeted as described in Shobaki N, Sato Y, Harashima H. Mixing lipids to manipulate the ionization status of lipid nanoparticles for specific tissue targeting. Int J Nanomedicine. 2018; 13:8395-8410. Published 2018 Dec. 10. In some embodiments, a transfer vehicle is made up of 3 lipid types. In some embodiments, a transfer vehicle is made up of 4 lipid types. In some embodiments, a transfer vehicle is made up of 5 lipid types. In some embodiments, a transfer vehicle is made up of 6 lipid types.

### 14. Target Cells

[1211] Where it is desired to deliver a nucleic acid to an immune cell, the immune cell represents the target cell. In some embodiments, the compositions of the invention transfect the target cells on a discriminatory basis (i.e., do not transfect non-target cells). The compositions of the invention may also be prepared to preferentially target a variety of target cells, which include, but are not limited to, T cells, B cells, macrophages, and dentritic cells.

[1212] In some embodiments, the target cells are deficient in a protein or enzyme of interest. For example, where it is desired to deliver a nucleic acid to a hepatocyte, the hepatocyte represents the target cell. In some embodiments, the compositions of the invention transfect the target cells on a discriminatory basis (i.e., do not transfect non-target cells). The compositions of the invention may also be prepared to preferentially target a variety of target cells, which include, but are not limited to, hepatocytes, epithelial cells, hematopoietic cells, epithelial cells, endothelial cells, lung cells, bone cells, stem cells, mesenchymal cells, neural cells (e.g., meninges, astrocytes, motor neurons, cells of the dorsal root ganglia and anterior horn motor neurons), photoreceptor cells (e.g., rods and cones), retinal pigmented epithelial cells, secretory cells, cardiac cells, adipocytes, vascular smooth muscle cells, cardiomyocytes, skeletal muscle cells, beta cells, pituitary cells, synovial lining cells, ovarian cells, testicular cells, fibroblasts, B cells, T cells, reticulocytes, leukocytes, granulocytes and tumor cells.

[1213] The compositions of the invention may be prepared to preferentially distribute to target cells such as in the heart, lungs, kidneys, liver, and spleen. In some embodiments, the compositions of the invention distribute into the cells of the liver or spleen to facilitate the delivery and the subsequent expression of the circRNA comprised therein by the cells of the liver (e.g., hepatocytes) or the cells of spleen (e.g., immune cells). The targeted cells may function as a biological “reservoir” or “depot” capable of producing, and systemically excreting a functional protein or enzyme. Accordingly, in one embodiment of the invention the transfer vehicle may target hepatocytes or immune cells and/or preferentially distribute to the cells of the liver or spleen upon delivery. In an embodiment, following transfection of the target hepatocytes or immune cells, the circRNA loaded in the vehicle are translated and a functional protein product is produced, excreted and systemically distributed. In other embodiments, cells other than hepatocytes (e.g., lung, spleen, heart, ocular, or cells of the central nervous system) can serve as a depot location for protein production.

[1214] In one embodiment, the compositions of the invention facilitate a subject's endogenous production of one or more functional proteins and/or enzymes. In an embodiment of the present invention, the transfer vehicles comprise circRNA which encode a deficient protein or enzyme. Upon distribution of such compositions to the target tissues and the subsequent transfection of such target cells, the exogenous circRNA loaded into the transfer vehicle (e.g., a lipid nanoparticle) may be translated in vivo to produce a functional protein or enzyme encoded by the exogenously administered circRNA (e.g., a protein or enzyme in which the subject is deficient). Accordingly, the compositions of the present invention exploit a subject's ability to translate exogenously- or recombinantly-prepared circRNA to produce an endogenously-translated protein or enzyme, and thereby produce (and where applicable excrete) a functional protein or enzyme. The expressed or translated proteins or enzymes may also be characterized by the in vivo inclusion of native post-translational modifications which may often be absent in recombinantly-prepared proteins or enzymes, thereby further reducing the immunogenicity of the translated protein or enzyme.

[1215] The administration of circRNA encoding a deficient protein or enzyme avoids the need to deliver the nucleic acids to specific organelles within a target cell. Rather, upon transfection of a target cell and delivery of the nucleic acids to the cytoplasm of the target cell, the circRNA contents of a transfer vehicle may be translated and a functional protein or enzyme expressed.

[1216] In some embodiments, a circular RNA comprises one or more miRNA binding sites. In some embodiments, a circular RNA comprises one or more miRNA binding sites recognized by miRNA present in one or more non-target cells or non-target cell types (e.g., Kupffer cells or hepatic cells) and not present in one or more target cells or target cell types (e.g., hepatocytes or T cells). In some embodiments, a circular RNA comprises one or more miRNA binding sites recognized by miRNA present in an increased concentration in one or more non-target cells or non-target cell types (e.g., Kupffer cells or hepatic cells) compared to one or more target cells or target cell types (e.g., hepatocytes or T cells). miRNAs are thought to function by pairing with complementary sequences within RNA molecules, resulting in gene silencing.

[1217] In some embodiments, the compositions of the invention transfect or distribute to target cells on a discriminatory basis (i.e. do not transfect non-target cells). The compositions of the invention may also be prepared to preferentially target a variety of target cells, which include, but are not limited to, hepatocytes, epithelial cells, hematopoietic cells, epithelial cells, endothelial cells, lung cells, bone cells, stem cells, mesenchymal cells, neural cells (e.g., meninges, astrocytes, motor neurons, cells of the dorsal root ganglia and anterior horn motor neurons), photoreceptor cells (e.g., rods and cones), retinal pigmented epithelial cells, secretory cells, cardiac cells, adipocytes, vascular smooth muscle cells, cardiomyocytes, skeletal muscle cells, beta cells, pituitary cells, synovial lining cells, ovarian cells, testicular cells, fibroblasts, B cells, T cells, reticulocytes, leukocytes, granulocytes and tumor cells.

### 15. Pharmaceutical Compositions

[1218] In certain embodiments, provided herein are compositions (e.g., pharmaceutical compositions) comprising a therapeutic agent provided herein. In some embodiments, the therapeutic agent is a circular RNA polynucleotide provided herein. In some embodiments the therapeutic agent is a vector provided herein. In some embodiments, the therapeutic agent is a cell comprising a circular RNA or vector provided herein (e.g., a human cell, such as a human T cell). In certain embodiments, the composition further comprises a pharmaceutically acceptable carrier. In some embodiments, the compositions provided herein comprise a therapeutic agent provided herein in combination with other pharmaceutically active agents or drugs, such as anti-inflammatory drugs or antibodies capable of targeting B cell antigens, e.g., anti-CD20 antibodies, e.g., rituximab.

[1219] With respect to pharmaceutical compositions, the pharmaceutically acceptable carrier can be any of those conventionally used and is limited only by chemico-physical considerations, such as solubility and lack of reactivity with the active agent(s), and by the route of administration. The pharmaceutically acceptable carriers described herein, for example, vehicles, adjuvants, excipients, and diluents, are well-known to those skilled in the art and are readily available to the public. It is preferred that the pharmaceutically acceptable carrier be one which is chemically inert to the therapeutic agent(s) and one which has no detrimental side effects or toxicity under the conditions of use.

[1220] The choice of carrier will be determined in part by the particular therapeutic agent, as well as by the particular method used to administer the therapeutic agent. Accordingly, there are a variety of suitable formulations of the pharmaceutical compositions provided herein.

[1221] In certain embodiments, the pharmaceutical composition comprises a preservative. In certain embodiments, suitable preservatives may include, for example, methylparaben, propylparaben, sodium benzoate, and benzalkonium chloride. Optionally, a mixture of two or more preservatives may be used. The preservative or mixtures thereof are typically present in an amount of about 0.00010% to about 2% by weight of the total composition.

[1222] In some embodiments, the pharmaceutical composition comprises a buffering agent. In some embodiments, suitable buffering agents may include, for example, citric acid, sodium citrate, phosphoric acid, potassium phosphate, and various other acids and salts. A mixture of two or more buffering agents optionally may be used. The buffering agent or mixtures thereof are typically present in an amount of about 0.001% to about 4% by weight of the total composition.

[1223] In some embodiments, the concentration of therapeutic agent in the pharmaceutical composition can vary, e.g., less than about 1%, or at least about 1%, 2%, 3%, 4%, 5%, 6%, 7%, 8%, 9% 10%%, 15, 20%, 25%, 30%, 35%, 40%, 45%, or about 50% or more by weight, and can be selected primarily by fluid volumes, and viscosities, in accordance with the particular mode of administration selected.

[1224] The following formulations for oral, aerosol, parenteral (e.g., subcutaneous, intravenous, intraarterial, intramuscular, intradermal, intraperitoneal, and intrathecal), and topical administration are merely exemplary and are in no way limiting. More than one route can be used to administer the therapeutic agents provided herein, and in certain instances, a particular route can provide a more immediate and more effective response than another route.

[1225] Formulations suitable for oral administration can comprise or consist of (a) liquid solutions, such as an effective amount of the therapeutic agent dissolved in diluents, such as water, saline, or orange juice; (b) capsules, sachets, tablets, lozenges, and troches, each containing a predetermined amount of the active ingredient, as solids or granules; (c) powders; (d) suspensions in an appropriate liquid; and (e) suitable emulsions. Liquid formulations may include diluents, such as water and alcohols, for example, ethanol, benzyl alcohol and the polyethylene alcohols, either with or without the addition of a pharmaceutically acceptable surfactant. Capsule forms can be of the ordinary hard or soft shelled gelatin type containing, for example, surfactants, lubricants, and inert fillers, such as lactose, sucrose, calcium phosphate, and corn starch. Tablet forms can include one or more of lactose, sucrose, mannitol, corn starch, potato starch, alginic acid, microcrystalline cellulose, acacia, gelatin, guar gum, colloidal silicon dioxide, croscarmellose sodium, talc, magnesium stearate, calcium stearate, zinc stearate, stearic acid, and other excipients, colorants, diluents, buffering agents, disintegrating agents, moistening agents, preservatives, flavoring agents, and other pharmacologically compatible excipients. Lozenge forms can comprise the therapeutic agent with a flavorant, usually sucrose, acacia or tragacanth. Pastilles can comprise the therapeutic agent with an inert base, such as gelatin and glycerin, or sucrose and acacia, emulsions, gels, and the like containing, in addition to, such excipients as are known in the art.

[1226] Formulations suitable for parenteral administration include aqueous and nonaqueous isotonic sterile injection solutions, which can contain antioxidants, buffers, bacteriostats, and solutes that render the formulation isotonic with the blood of the intended recipient, and aqueous and nonaqueous sterile suspensions that can include suspending agents, solubilizers, thickening agents, stabilizers, and preservatives. In some embodiments, the therapeutic agents provided herein can be administered in a physiologically acceptable diluent in a pharmaceutical carrier, such as a sterile liquid or mixture of liquids including water, saline, aqueous dextrose and related sugar solutions, an alcohol such as ethanol or hexadecyl alcohol, a glycol such as propylene glycol or polyethylene glycol, dimethylsulfoxide, glycerol, ketals such as 2,2-dimethyl-1,3-dioxolane-4-methanol, ethers, poly(ethyleneglycol) 400, oils, fatty acids, fatty acid esters or glycerides, or acetylated fatty acid glycerides with or without the addition of a pharmaceutically acceptable surfactant such as a soap or a detergent, suspending agent such as pectin, carbomers, methylcellulose, hydroxypropylmethylcellulose, or carboxymethylcellulose, or emulsifying agents and other pharmaceutical adjuvants.

[1227] Oils, which can be used in parenteral formulations in some embodiments, include petroleum, animal oils, vegetable oils, or synthetic oils. Specific examples of oils include peanut, soybean, sesame, cottonseed, corn, olive, petrolatum, and mineral oil. Suitable fatty acids for use in parenteral formulations include oleic acid, stearic acid, and isostearic acid. Ethyl oleate and isopropyl myristate are examples of suitable fatty acid esters.

[1228] Suitable soaps for use in certain embodiments of parenteral formulations include fatty alkali metal, ammonium, and triethanolamine salts, and suitable detergents include (a) cationic detergents such as, for example, dimethyl dialkyl ammonium halides, and alkyl pyridinium halides, (b) anionic detergents such as, for example, alkyl, aryl, and olefin sulfonates, alky, olefin, ether, and monoglyceride sulfates, and sulfosuccinates, (c) nonionic detergents such as, for example, fatty amine oxides, fatty acid alkanolamides, and polyoxyethylenepolypropylene copolymers, (d) amphoteric detergents such as, for example, alkyl-β-aminopropionates, and 2-alkyl-imidazoline quaternary ammonium salts, and (e) mixtures thereof.

[1229] In some embodiments, the parenteral formulations will contain, for example, from about 0.5% to about 25% by weight of the therapeutic agent in solution. Preservatives and buffers may be used. In order to minimize or eliminate irritation at the site of injection, such compositions may contain one or more nonionic surfactants having, for example, a hydrophile-lipophile balance (HLB) of from about 12 to about 17. The quantity of surfactant in such formulations will typically range, for example, from about 5% to about 15% by weight. Suitable surfactants include polyethylene glycol, sorbitan, fatty acid esters such as sorbitan monooleate, and high molecular weight adducts of ethylene oxide with a hydrophobic base formed by the condensation of propylene oxide with propylene glycol. The parenteral formulations can be presented in unit-dose or multi-dose sealed containers, such as ampoules or vials, and can be stored in a freeze-dried (lyophilized) condition requiring only the addition of a sterile liquid excipient, for example, water for injections, immediately prior to use. Extemporaneous injection solutions and suspensions can be prepared from sterile powders, granules, and tablets of the kind previously described.

[1230] In certain embodiments, injectable formulations are provided herein. The requirements for effective pharmaceutical carriers for injectable compositions are well-known to those of ordinary skill in the art (see, e.g., Pharmaceutics and Pharmacy Practice, J.B. Lippincott Company, Philadelphia, PA, Banker and Chalmers, eds., pages 238-250 (1982), and ASHP Handbook on Injectable Drugs, Toissel, 4th ed, pages 622-630 (1986)).

[1231] In some embodiments, topical formulations are provided herein. Topical formulations, including those that are useful for transdermal drug release, are suitable in the context of certain embodiments provided herein for application to skin. In some embodiments, the therapeutic agent alone or in combination with other suitable components, can be made into aerosol formulations to be administered via inhalation. These aerosol formulations can be placed into pressurized acceptable propellants, such as dichlorodifluoromethane, propane, nitrogen, and the like. They also may be formulated as pharmaceuticals for non-pressured preparations, such as in a nebulizer or an atomizer. Such spray formulations also may be used to spray mucosa.

[1232] In certain embodiments, the therapeutic agents provided herein can be formulated as inclusion complexes, such as cyclodextrin inclusion complexes, or liposomes. Liposomes can serve to target the therapeutic agents to a particular tissue. Liposomes also can be used to increase the half-life of the therapeutic agents. Many methods are available for preparing liposomes, as described in, for example, Szoka et al., Ann. Rev. Biophys. Bioeng., 9, 467 (1980) and U.S. Pat. Nos. 4,235,871, 4,501,728, 4,837,028, and 5,019,369.

[1233] In some embodiments, the therapeutic agents provided herein are formulated in time-released, delayed release, or sustained release delivery systems such that the delivery of the composition occurs prior to, and with sufficient time to, cause sensitization of the site to be treated. Such systems can avoid repeated administrations of the therapeutic agent, thereby increasing convenience to the subject and the physician, and may be particularly suitable for certain composition embodiments provided herein. In one embodiment, the compositions of the invention are formulated such that they are suitable for extended-release of the circRNA contained therein. Such extended-release compositions may be conveniently administered to a subject at extended dosing intervals. For example, in one embodiment, the compositions of the present invention are administered to a subject twice a day, daily or every other day. In an embodiment, the compositions of the present invention are administered to a subject twice a week, once a week, every ten days, every two weeks, every three weeks, every four weeks, once a month, every six weeks, every eight weeks, every three months, every four months, every six months, every eight months, every nine months or annually.

[1234] In some embodiments, a protein encoded by an inventive polynucleotide is produced by a target cell for sustained amounts of time. For example, the protein may be produced for more than one hour, more than four, more than six, more than 12, more than 24, more than 48 hours, or more than 72 hours after administration. In some embodiments the polypeptide is expressed at a peak level about six hours after administration. In some embodiments the expression of the polypeptide is sustained at least at a therapeutic level. In some embodiments, the polypeptide is expressed at least at a therapeutic level for more than one, more than four, more than six, more than 12, more than 24, more than 48, or more than 72 hours after administration. In some embodiments, the polypeptide is detectable at a therapeutic level in patient tissue (e.g., liver or lung). In some embodiments, the level of detectable polypeptide is from continuous expression from the circRNA composition over periods of time of more than one, more than four, more than six, more than 12, more than 24, more than 48, or more than 72 hours after administration.

[1235] In certain embodiments, a protein encoded by an inventive polynucleotide is produced at levels above normal physiological levels. The level of protein may be increased as compared to a control. In some embodiments, the control is the baseline physiological level of the polypeptide in a normal individual or in a population of normal individuals. In other embodiments, the control is the baseline physiological level of the polypeptide in an individual having a deficiency in the relevant protein or polypeptide or in a population of individuals having a deficiency in the relevant protein or polypeptide. In some embodiments, the control can be the normal level of the relevant protein or polypeptide in the individual to whom the composition is administered. In other embodiments, the control is the expression level of the polypeptide upon other therapeutic intervention, e.g., upon direct injection of the corresponding polypeptide, at one or more comparable time points.

[1236] In certain embodiments, the levels of a protein encoded by an inventive polynucleotide are detectable at 3 days, 4 days, 5 days, or 1 week or more after administration. Increased levels of protein may be observed in a tissue (e.g., liver or lung).

[1237] In some embodiments, the method yields a sustained circulation half-life of a protein encoded by an inventive polynucleotide. For example, the protein may be detected for hours or days longer than the half-life observed via subcutaneous injection of the protein or mRNA encoding the protein. In some embodiments, the half-life of the protein is 1 day, 2 days, 3 days, 4 days, 5 days, or 1 week or more.

[1238] Many types of release delivery systems are available and known to those of ordinary skill in the art. They include polymer based systems such as poly(lactide-glycolide), copolyoxalates, polycaprolactones, polyesteramides, polyorthoesters, polyhydroxybutyric acid, and polyanhydrides. Microcapsules of the foregoing polymers containing drugs are described in, for example, U.S. Pat. No. 5,075,109. Delivery systems also include non-polymer systems that are lipids including sterols such as cholesterol, cholesterol esters, and fatty acids or neutral fats such as mono-di-and tri-glycerides; hydrogel release systems; sylastic systems; peptide based systems: wax coatings; compressed tablets using conventional binders and excipients; partially fused implants; and the like. Specific examples include, but are not limited to: (a) erosional systems in which the active composition is contained in a form within a matrix such as those described in U.S. Pat. Nos. 4,452,775, 4,667,014, 4,748,034, and 5,239,660 and (b) diffusional systems in which an active component permeates at a controlled rate from a polymer such as described in U.S. Pat. Nos. 3,832,253 and 3,854,480. In addition, pump-based hardware delivery systems can be used, some of which are adapted for implantation.

[1239] In some embodiments, the therapeutic agent can be conjugated either directly or indirectly through a linking moiety to a targeting moiety. Methods for conjugating therapeutic agents to targeting moieties is known in the art. See, for instance, Wadwa et al., J, Drug Targeting 3:111 (1995) and U.S. Pat. No. 5,087,616.

[1240] In some embodiments, the therapeutic agents provided herein are formulated into a depot form, such that the manner in which the therapeutic agent is released into the body to which it is administered is controlled with respect to time and location within the body (see, for example, U.S. Pat. No. 4,450,150). Depot forms of therapeutic agents can be, for example, an implantable composition comprising the therapeutic agents and a porous or non-porous material, such as a polymer, wherein the therapeutic agents are encapsulated by or diffused throughout the material and/or degradation of the non-porous material. The depot is then implanted into the desired location within the body and the therapeutic agents are released from the implant at a predetermined rate.

### 16. Therapeutic Methods

[1241] In certain aspects, provided herein is a method of treating and/or preventing a condition, e.g., an autoimmune disorder or cancer.

[1242] In certain embodiments, the therapeutic agents provided herein are co-administered with one or more additional therapeutic agents (e.g., in the same pharmaceutical composition or in separate pharmaceutical compositions). In some embodiments, the therapeutic agent provided herein can be administered first and the one or more additional therapeutic agents can be administered second, or vice versa. Alternatively, the therapeutic agent provided herein and the one or more additional therapeutic agents can be administered simultaneously.

[1243] In some embodiments, the subject is a mammal. In some embodiments, the mammal referred to herein can be any mammal, including, but not limited to, mammals of the order Rodentia, such as mice and hamsters, or mammals of the order Logomorpha, such as rabbits. The mammals may be from the order Carnivora, including Felines (cats) and Canines (dogs). The mammals may be from the order Artiodactyla, including Bovines (cows) and Swines (pigs), or of the order Perssodactyla, including Equines (horses). The mammals may be of the order Primates, Ceboids, or Simoids (monkeys) or of the order Anthropoids (humans and apes). Preferably, the mammal is a human.

### 17. Sequences

TABLE 17
IRES sequences.

| SEQ | | |
|---|---|---|
| ID | | |
| NO | IRES | Sequence |
| 1 | EMCV-A | cccccctctccctccccccctaacgttactggccgaagccgcttggaataaggccggtgtgcgttt |
| | | gtctatatgttattttccaccatattgccgtcttttggcaatgtgagggcccggaaacctggccctgtct |
| | | tcttgacgagcattcctaggggtctttcccctctcgccaaaggaatgcaaggtctgttgaatgtcgtg |
| | | aaggaagcagttcctctggaagcttcttgaagacaaacaacgtctgtagcgaccctttgcaggcag |
| | | cggaaccccccacctggcgacaggtgcctctgcggccaaaagccacgtgtataagatacacctg |
| | | caaaggcggcacaaccccagtgccacgttgtgagttggatagttgtggaaagagtcaaatggctc |
| | | tcctcaagcgtattcaacaaggggctgaaggatgcccagaaggtaccccattgtatgggatctgat |
| | | ctggggcctcggtgcacatgctttacatgtgtttagtcgaggttaaaaaacgtctaggccccccgaa |
| | | ccacggggacgtggttttcctttgaaaaacacgatgataatatggccacaacc |
| 2 | EMCV-B | ctccccctccccccccttactatactggccgaagccacttggaataaggccggtgtgcgtttgtcta |
| | | catgctattttctaccgcattaccgtcttatggtaatgtgagggtccagaacctgaccctgtcttcttga |
| | | cgaacactcctaggggtctttcccctctcgacaaaggagtgtaaggtctgttgaatgtcgtgaagga |
| | | agcagttcctctggaagcttcttaaagacaaacaacgtctgtagcgaccctttgcaggcagcggaa |
| | | ccccccacctggtgacaggtgcctctgcggccaaaagccacgtgtataagatacacctgcaaag |
| | | gcggcacaaccccagtgccacgttgtgagttggatagttgtggaaagagtcaaatggctctcctca |
| | | agcgtattcaacaaggggctgaaggatgcccagaaggtaccccattgtatgggatctgatctggg |
| | | gcctcggtgcacgtgctttacacgtgttgagtcgaggtgaaaaaacgtctaggccccccgaacca |
| | | cggggacgtggttttcctttgaaaaccacgattacaat |
| 3 | EMCV-Bf | ttgccagtctgctcgatatcgcaggctgggtccgtgactacccactccccctttcaacgtgaaggct |
| | | acgatagtgccaggggggtactgccgtaagtgccaccccaaacaacaacaacaaaacaaactc |
| | | cccctccccccccttactatactggccgaagccacttggaataaggccggtgtgcgtttgtctacat |
| | | gctattttctaccgcattaccgtcttatggtaatgtgagggtccagaacctgaccctgtcttcttgacg |
| | | aacactcctaggggtctttcccctctcgacaaaggagtgtaaggtctgttgaatgtcgtgaaggaag |
| | | cagttcctctggaagcttcttaaagacaaacaacgtctgtagcgaccctttgcaggcagcggaacc |
| | | ccccacctggtgacaggtgcctctgcggccaaaagccacgtgtataagatacacctgcaaaggc |
| | | ggcacaaccccagtgccacgttgtgagttggatagttgtggaaagagtcaaatggctctcctcaag |
| | | cgtattcaacaaggggctgaaggatgcccagaaggtaccccattgtatgggatctgatctggggc |
| | | ctcggtgcacgtgctttacacgtgttgagtcgaggtgaaaaaacgtctaggccccccgaaccacg |
| | | gggacgtggttttcctttgaaaaccacgattacaat |
| 4 | EMCV-Cf | ttgccagtctgctcgatatcgcaggctgggtccgtgactacccactccccctttcaacgtgaaggct |
| | | acgatagtgccaggggggtactgccgtaagtgccaccccaaaacaacaacaaccccccctctc |
| | | cctccTccccccctaacgttactggccgaagccgcttggaataaggccggtgtgcgtttgtctatat |
| | | gttattttccaccatattgccgtcttttggcaatgtgagggcccggaaacctggccctgtcttcttgac |
| | | gagcattcctaggggtctttcccctctcgccaaaggaatgcaaggtctgttgaatgtcgtgaaggaa |
| | | gcagttcctctggaagcttcttgaagacaaacaacgtctgtagcgaccctttgcaggcagcggaac |
| | | cccccacctggcgacaggtgcctctgcggccaaaagccacgtgtataagatacacctgcaaagg |
| | | cggcacaaccccagtgccacgttgtgagttggatagttgtggaaagagtcaaatggctctcctcaa |
| | | gcgtattcaacaaggggctgaaggatgcccagaaggtaccccattgtatgggatctgatctgggg |
| | | cctcggtgcacatgctttacatgtgtttagtcgaggttaaaaaacgtctaggccccccgaaccacgg |
| | | ggacgtggttttcctttgaaaaacacgatgataat |
| 5 | EMCV pEC9 | ccccccccctaacgttactggccgaagccgcttggaataaggccggtgtgcgtttgtctatatgttat |
| | | tttccaccatattgccgtcttttggcaatgtgagggcccggaaacctggccctgtcttcttgacgagc |
| | | attcctaggggtctttcccctctcgccaaaggaatgcaaggtctgttgaatgtcgtgaaggaagcag |
| | | ttcctctggaagcttcttgaagacaaacaacgtctgtagcgaccctttgcaggcagcggaaccccc |
| | | cacctggcgacaggtgcctctgcggccaaaagccacgtgtataagatacacctgcaaaggcggc |
| | | acaaccccagtgccacgttgtgagttggatagttgtggaaagagtcaaatggctctcctcaagcgt |
| | | attcaacaaggggctgaaggatgcccagaaggtaccccattgtatgggatctgatctggggcctc |
| | | ggtgcacatgctttacatgtgtttagtcgaggttaaaaaacgtctaggccccccgaaccacgggga |
| | | cgtggttttcctttgaaaaacacgatgataat |
| 6 | Picobirnavirus | gtaaattaaatgctatttacaaaatttaaacagaaaggagagatgttatgaaccggttttacaaggttt |
| | | catacatcgaaaatagcactacctggggcagccgacacactaacatcgtctgtttaaccagaagtg |
| | | ttactgaaaggaggttattta |
| 7 | HCV QC64 | acctgcccctaataggggcgacactccgccatgaatcactcccctgtgaggaactactgtcttcac |
| | | gcagaaagcgtctagccatggcgttagtatgagtgtcgtacagcctccaggcccccccctcccgg |
| | | gagagccatagtggtctgcggaaccggtgagtacaccggaattgccgggaagactgggtcctttc |
| | | ttggataaacccactctatgcccggacatttgggcgtgcccccgcaagactgctagccgagtagc |
| | | gttgggttgcgaaaggccttgtggtactgcctgatagggtgcttgcgagtgccccgggaggtctcg |
| | | tagaccgtgcatc |
| 8 | Human Cosavirus | ctacaagctttgtgtaaacaaacttttgtttggcttttctcaagcttctctcacatcaggccccaaagat |
| | E/D | gtcctgaaggtaccccgtgtatctgaggatgagcaccatcgactacccggacctgcaaaattttgc |
| | | aaacgcatgtggtatcccagccccctcctctcggggagggggctttgctcactcagcacaggatct |
| | | gatcaggagatccacctccggtgctttacaccggggcgtggatttaaaaattgcccaaggcctggc |
| | | gcacaacctaggggactaggttttccttatattttaaagctgtcaat |
| 9 | Human Cosavirus | gtcttaggacgacgcatgtggtatcccagcccccgcctacattggcgggggcttttgaagcacca |
| | F | gacactggatctgatcaggaggagggtagctgctttacagcccctcttaaaaattgcccaaggtcc |
| | | ggccacccaacctaggggactaggttttccttttatttttaaattgtcatt |
| 10 | Human Cosavirus | acatgggggagactgcatgtggcagtcttgaaacgtgtggtttgacgtctaccttatatggcagtgg |
| | JMY | gtggagtactgcaaagatgtcaccgtgctttacacggtttttgaaccccacaccggctgtttgacgct |
| | | cgtagggcagcaggtttattttcattaaaattcttactttctagctgcatgagttctattcatgcagacgg |
| | | agtgatactcccgttccttcttggacaggttgcctccacgccctttgtggatcttaaggtgaccaagtc |
| | | actggtgttggaggtgaagatagagagtcctcttgggaatgtcatgtggctgtgccaggggttgta |
| | | gcgatgccattcgtgtgtgcggatttcctctcgtggtgacacgagcctcacaggccaaaagccccg |
| | | tccgaaaggacccgaatggtggagtgaccctgactcccccctgcatagttttgtgattaggaacttg |
| | | aggaatttctgtcataaatctctatcacatcaggccccaaagatgtcctgaaggtaccctgtgtatctg |
| | | aggatgagcaccaccgactacccggacttgcattagcagacacatgtggttgcccagccccacct |
| | | cttcagaggtggggctttgctcactcagcacaggatctgatcaggagccccgctcgtgtgctttaca |
| | | ctcgacgcggggttaaaaattgcccaaggcctggcacaacaacctaggggactaggttttcctattt |
| | | ttgtaaattatgtcaat |
| 11 | Rhinovirus | gtgacaatcagccagattgttaacggtcaagcacttctgtttccccggtacccttgtatacgcttcacc |
| | NAT001 | cgaggcgaaaagtgaggttatcgttatccgcaaagtgcctacgagaagcctagtagcacttttgaa |
| | | gcctatggctggtcgctcaactgtttacccagcagtagacctggcagatgaggctagatgttcccc |
| | | accagcgatggtgatctagcctgcgtggctgcctgcacactctattgagtgtgaagccagaaagtg |
| | | gacaaggtgtgaagagcctattgtgctcactttgagtcctccggcccctgaatgtggctaatcctaa |
| | | ccccgtagctgttgcatgtaatccaacatgtctgcagtcgtaatgggcaactatgggatggaaccaa |
| | | ctactttgggtgtccgtgtttcttgtttttctttatgcttgcttatggtgacaactgtagttattacatttgtta |
| | | Cc |
| 12 | HRV14 | ttaaaacagcggatgggtatcccaccattcgacccattgggtgtagtactctggtactatgtacctttg |
| | | tacgcctgtttctccccaaccacccttccttaaaattcccacccatgaaacgttagaagcttgacatta |
| | | aagtacaataggtggcgccatatccaatggtgtctatgtacaagcacttctgtttcccaggagcgag |
| | | gtataggctgtacccactgccaaaagcctttaaccgttatccgccaaccaactacgtaacagttagt |
| | | accatcttgttcttgactggacgttcgatcaggtggattttccctccactagtttggtcgatgaggcta |
| | | ggaattccccacgggtgaccgtgtcctagcctgcgtggcggccaacccagcttatgctgggacgc |
| | | ccttttaaggacatggtgtgaagactcgcatgtgcttggttgtgagtcctccggcccctgaatgcgg |
| | | ctaaccttaaccctagagccttatgccacgatccagtggttgtaaggtcgtaatgagcaattccggg |
| | | acgggaccgactactttgggtgtccgtgtttctcatttttcttcatattgtcttatggtcacagcatatata |
| | | tacatatactgtgatc |
| 13 | HRV89 | ttaaaactgggagtgggttgttcccactcactccacccatgcggtgttgtactctgttattacggtaac |
| | | tttgtacgccagtttttcccacccttccccataatgtaacttagaagtttgtacaatatgaccaataggt |
| | | gacaatcatccagactgtcaaaggtcaagcacttctgtttccccggtcaatgaggatatgctttaccc |
| | | aaggcaaaaaccttagagatcgttatccccacactgcctacacagagcccagtaccatttttgatat |
| | | aattgggttggtcgctccctgcaaacccagcagtagacctggcagatgaggctggacattcccca |
| | | ctggcgacagtggtccagcctgcgtggctgcctgctcacccttcttgggtgagaagcctaattattg |
| | | acaaggtgtgaagagccgcgtgtgctcagtgtgcttcctccggcccctgaatgtggctaaccttaa |
| | | ccctgcagccgttgcccataatccaatgggtttgcggtcgtaatgcgtaagtgcgggatgggacca |
| | | actactttgggtgtccgtgtttcctgtttttcttttgattgcattttatggtgacaatttatagtgtatagattg |
| | | tcatc |
| 14 | HRVC-02 | ttaaaactgggtacaggttgttcccacctgtatcacccacgtggtgtggtgctcttgtattccggtaca |
| | | cttgcacgccagtttgccacccctcacccgtcgtaacttagaagctaacaactcgaccaacaggcg |
| | | gtggtaaaccataccacttacggtcaagcactcctgtttccccggtatgcgaggaatagactcctac |
| | | agggttgaagcctcaagtatcgttatccgcattggtactacgcaaagcttagtagtgccttgaaagtc |
| | | ccttggttggtcgctccgctagtttcccctagtagacctggcagatgaggcaggacactccccact |
| | | ggcgacagtggtcctgcctgcgtggctgcctgcgcacccttaggggtgcgaagccaagtgacag |
| | | acaaggtgtgaagagccccgtgtgctaccaatgagtcctccggcccctgaatgcggctaatccaa |
| | | ccccacagctattgcacacaagccagtgtgtatgtagtcgtaatgagcaattgtgggacggaaccg |
| | | actactttgggtgtccgtgtttccttttattcttatcattctgcttatggtgacaatactgtgaaatagtgtt |
| | | gttacc |
| 15 | HRV-A21 | taaaactggatccaggttgttcccacctggatctcctattgggagttgtactctattattccggtaatttt |
| | | gtacgccagttttatcttccccctccccaattgtaacttagaaggttatcaatacgaccaataggtggt |
| | | agttagccaaactaccaaaggtcaagcacttctgtttccccggtcaaagttgatatgctccaacagg |
| | | gcaaaaacaactgagatcgttatccgcaaagtgcctacgcaaagcctagtaacacctttgaagattt |
| | | atggttggtcgttccgctatttcccatagtagacctggcagatgaggctagaaatcccccactggcg |
| | | acagtgctctagcctgcgtggctgcctgcgcaccccttgggtgcgaagccatacattggacaagg |
| | | tgtgaagagccccgtgtgctcactttgagtcctccggcccctgaatgtggctaaccttaaccctgca |
| | | gctagtgcatgtaatccaacatgttgctagtcgtaatgagtaattgcgggacgggaccaactactttg |
| | | ggtgtccgtgtttcactttttccttttaatattgcttatggtgacaatatatatagctatatatattgacacc |
| 16 | Salivirus A SH1 | ttcccctgcaaccattacgcttactcgcatgtgcattgagtggtgcatgtgttgaacaaacagctaca |
| | | ctcacatggggggggttttcccgccctacggcttctcgcgaggcccacccctcccctttctcccat |
| | | aactacagtgctttggtaggtaagcatcctgatcccccgcggaagctgctcacgtggcaactgtgg |
| | | ggacccagacaggttatcaaaggcacccggtctttccgccttcaggagtatccctgctagcgaatt |
| | | ctagtagggctctgcttggtgccaacctcccccaaatgcgcgctgcgggagtgctcttccccaact |
| | | caccctagtatcctctcatgtgtgtgcttggtcagcatatctgagacgatgttccgctgtcccagacc |
| | | agtccagtaatggacgggccagtgtgcgtagtcgtcttccggcttgtccggcgcatgtttggtgaac |
| | | cggtggggtaaggttggtgtgcccaacgcccgtactcaggggatacctcaaggcacccaggaat |
| | | gccagggaggtaccccgcttcacagcgggatctgaccctggggtaaatgtctgcggggggtcttc |
| | | ttggcccacttctcagtacttttcagg |
| 17 | Salivirus FHB | acatggggggtctgcggacggcttcggcccacccgcgacaagaatgccgtcatctgtcctcatta |
| | | cccgtattccttcccttcccccgcaaccaccacgcttactcgcgcacgtgttgagtggcacgtgcgt |
| | | tgtccaaacagctacacccacacccttcggggcgggtttgtcccgccctcgggttcctcgcggaa |
| | | cccccccctccctctctctctttctatccgccctcacttcccataactacagtgctttggtaggtgagc |
| | | accctgaccccccgcggaagctgctaacgtggcaactgtggggatccaggcaggttatcaaagg |
| | | cacccggtctttccgccttcaggagtatctctgccggtgaattccggtagggctctgcttggtgcca |
| | | acctcccccaaatgcgcgctgcgggagtgctcttccccaactcatcttagtaacctctcatgtgtgtg |
| | | cttggtcagcatatctgaggcgacgttccgctgtcccagaccagtccagcaatggacgggccagt |
| | | gtgcgtagtcgctttccggttttccggcgcatgtttggcgaaacgctgaggtaaggttggtgtgccc |
| | | aacgcccgtaatttggtgatacctcaagaccacccaggaatgccagggaggtaccccacttcggt |
| | | gggatctgaccctgggctaattgtctacggtggttcttcttgcttccacttctcttttttctggcatg |
| 18 | Salivirus NG-J1 | tatggcaggcgggcttgtggacggcttcggcccacccacagcaagaatgccatcatctgtcctca |
| | | cccccaattttcccttttcttcccctgcaaccattacgcttactcgcatgtgcattgagtggtgcatgtgt |
| | | tgaacaaacagctacactcacatggggggggttttcccgccctacggcctctcgcgaggcccac |
| | | cccttccctccccttataactacagtgctttggtaggtaagcatcctgatcccccgcggaagctgctc |
| | | acgtggcaactgtggggacccagacaggttatcaaaggcacccggtctttccgccttcaggagtat |
| | | ccctactagtgaattctagcggggctctgcttggtgccaacctcccccaaatgcgcgctggggag |
| | | tgctcttccccaactcaccctagtatcctctcatgtgtgtgcttggtcagcatatctgagacgatgttcc |
| | | gctgtcccagaccagtccagtaatggacgggccagtgcgtgtagtcgtcttccggcttgtccggg |
| | | gcatgtttggtgaaccggtggggtaaggttggtgtgcccaacgcccgtactttggtgacacctcaa |
| | | gaccacccaggaatgccagggaggtaccccacctcacggtgggatctgaccctgggctaattgt |
| | | ctacggtggttcttcttgcttccacttctttcttctgttcacg |
| 19 | Human | tttgaaaggggtctcctagagagcttggccgtcgggccttataccccgacttgctgagtttctctagg |
| | Parechovirus 1 | agagcccttttcccagccctgaggcggctggtcaataaaagcctcaaacgtaactaacacctaaga |
| | | agatcatgtaaaccctatgcctggtctccactattcgaaggcaacttgcaataagaagagtgggatc |
| | | aagacgcttaaagcatagagacagttttttttctaacccacatttgtgtggggtggcagatggcgtg |
| | | ccataactctaatagtgagataccacgcttgtggaccttatgctcacacagccatcctctagtaagttt |
| | | gtgagacgtctggtgacgtgtgggaacttattggaaacaacattttgctgcaaagcatcctactgcc |
| | | agcggaaaaacacctggtaacaggtgcctctggggccaaaagccaaggtttaacagaccctttag |
| | | gattggttctaaacctgagatgttgtggaagatatttagtacctgctgatctggtagttatgcaaacact |
| | | agttgtaaggcccatgaaggatgcccagaaggtacccgtaggtaacaagtgacactatggatctg |
| | | atttggggccagatacctctatcttggtgatctggttaaaaaacatctaatgggccaaacccggggg |
| | | ggatccccggtttcctcttattctatcaatgccact |
| 20 | Crohivirus B | gtataagagacaggtgtttgccttgtcttcggactggcatcttgggaccaaccccccttttccccagc |
| | | catgggttaaatggcaataaaggacgtaacaactttgtaaccattaagctttgtaattttgtaaccact |
| | | aagctttgtgcacataatgtaaccatcaagcttgttagtcccagcaggaggtttgcatgcttgtagcc |
| | | gaaatggggctcgaccccccatagtaggatacttgattttgcattccattgtggacctgcaaactcta |
| | | cacatagaggctttgtcttgcatctaaacacctgagtacagtgtgtacctagaccctatagtacggga |
| | | ggaccgtttgtttcctcaataaccctacataataggctaggtgggcatgcccaatttgcaagatccca |
| | | gactgggggtcggtctgggcagggttagatccctgttagctactgcctgatagggtggtgctcaac |
| | | catgtgtagtttaaattgagctgttcatatacc |
| 21 | Yc-3 | actgaagatcctacagtaactactgccccaatgaacgccacagatgggtctgctgatgactacctat |
| | | cttagtgctagttgaggtttgaagtgagccggtttttagaagaaccagtttctgaacattatcatcccc |
| | | agcatctattctatacgcacaagatagatagtcatcagcagacacatctgtgctactgcttgatagag |
| | | ttgcggctggtcaacttagattggtataaccagttgagtggcaa |
| 22 | Rosavirus M-7 | tatgcatcactggacggcctaacctcggtcgtggcttcttgccgatttcagcgctaccaggctttctg |
| | | gtctcgccaggcgttgattagtaggtgcactgtctaagtgaagacagcagtgctctctgtgaaaagt |
| | | tgatgacactcttcaggtttgtagcgatcactcaaggctagcggatttccccgtgtggtaacacacg |
| | | cctctaggcccagaaggcacggtgttgacagcaccccttgagtggctggtcttccccaccagcac |
| | | ctgatttgtggattcttcctagtaacggacaagcatggctgctcttaagcattcagtgcgtccggggc |
| | | tgaaggatgcccagaaggtacccgcaggtaacgataagctcactgtggatctgatctggggctgc |
| | | gggctgggtgtctttccacccagccaaaacccgtaaaacggtagtcgcagttaaaaaacgtctag |
| | | gccccacccccccagggatggggggttcccttaaaccctcacaagttcaac |
| 23 | Shanbavirus A | tgaaaagggggcgcagggtggtggtggttactaaatacccaccatcgccctgcacttcccttttcc |
| | | cctgtggctcagggtcacttagccccctctttgggttaccagtagttttctacccctgggcacagggt |
| | | taactatgcaagacggaacaacaatctcttagtccccctcgccgatagtgggctcgacccccatgt |
| | | gtaggagtggataagggacggagtgagccgatacggggaagagtgtgcggtcacaccttaattc |
| | | catgagcgctgcgaagaaggaagctgtgaacaatggcgacctgaaccgtacacatggagctcca |
| | | caggcatggtactcgttagactacgcagcctggttgggagtgggtataccctgggtgagccgcca |
| | | gtgaatgggagttcactggttaacacacactgcctgatagggtcagggcctcctgtccccgccgta |
| | | atgaggtagaccatatgcc |
| 24 | Pasivirus A | gcggctggatattctggccgtgcaactgcttttgaccagtggctctgggtaacttagccaaagtgtc |
| | | cttctccctttccctattatatgttttatggctttgtctggtcttgtttagtttatatataagatcctttccgcc |
| | | gatatagacctcgacagtctagtgtaggaggattggtgatattaatttgccccagaagagtgaccgt |
| | | gacacatagaaaccatgagtacatgtgtatccgtggaggatcgcccgggactggattccatatccc |
| | | attgccatcccaacaagcggagggtatacccactatgtgcacgtctgcagtgggagtctgcagatt |
| | | tagtcatactgcctgatagggtgtgggcctgcactctggggtactcaggctgtttatataat |
| 25 | Pasivirus A 2 | gctggactttctggctgcgcaactgcttttaaccagtggctctgggttacttagccaaaaccccctttc |
| | | cccgtaccctagtttgtgtgtgtattattattttgttgttgttttgtaaatttttatataagatcctttccgccg |
| | | atatagacctcgacagtctagtgtaggaggattggtgatattaatatgccccagaagagtgaccgtg |
| | | acacatagaaaccatgagtacatgtgtatccgtggaggatcgcccgggactggattccatatccca |
| | | ttgccatcccaacaaacggagggtatacccgctatgtgcgcgtctacagtgggaatctgtagattta |
| | | gtcatactgcctgatagggtgtgggcctgcactctggggtactcaggctgtttatataat |
| 26 | Echovirus E14 | ttaaaacagcctgtgggttgttcccatccacagggcccactgggcgccagcactctggtattgcgg |
| | | taccttagtgcgcctgttttatatacccgtcccccaaacgtaacttagacgcatgtcaacgaagacca |
| | | atagtaagcgcagcacaccagctgtgttccggtcaagcacttctgttaccccggaccgagtatcaa |
| | | taagctactcacgtggctgaaggagaaaacgttcgttacccgaccaattacttcaagaaacctagta |
| | | acaccatgaaggttgcgcagtgtttcgctccgcacaaccccagtgtagatcaggtcgatgagtcac |
| | | cgcattccccacgggtgaccgtggcggtggctgcgctggcggcctgcccatggggaaacccat |
| | | gggacgcttcaatactgacatggtgcgaagagtctattgagctaattggtagtcctccggcccctga |
| | | atgcggctaatcctaactgcggagcagatacccacacaccagtgggcagtctgtcgtaacgggca |
| | | actctgcagcggaaccgactactttgggtgtccgtgtttctctttatccttatactggctgcttatggtg |
| | | acaattgagagattgttaccatatagctattggattggccatccggtgacaaatagagcaattgtgtat |
| | | ttgtttgttggtttcgtgccattaaattacaaggttctaaacacccttaatcttattatagcattcaacaca |
| | | acaaa |
| 27 | Human | gtacattagatgcgtcatctgcaactttagtcaataaattacctccaatgtcattaccaacattccctac |
| | Parechovirus 5 | cttttcactaacacctaagacaacaagtacctatgcctggtctccactattcgaaggcaacttgcaat |
| | | aagaagagtggaattaagacgcttaaagcatagagctagttatcttttctaacccacaaagttttgtg |
| | | gggtggcagatggcgtgccataactctattagtgagataccatgcttgtggatcttatgctcacaca |
| | | gccatcctctagtaagttgataaggtgtctggtgatatgtgggaactcacatgaaccattaatttaccg |
| | | taaggtatcctatagccagcggaatcacatctggtgacagatgcctctggggccgaaagccaagg |
| | | tttaacagaccctataggattggtttcaaaacctgaattgatgtggattgtgtatagtacctgttgatct |
| | | ggtaacagtgtcaacactagttgtaaggcccacgaaggatgcccagaaggtacccgtaggtaaca |
| | | agtgacactatggatctgatctggggccagctacctctatcatggtgagttggttaaaaaacgtctag |
| | | tgggccaaacccaggggggatccctggtttccttttacctaatcaaagccact |
| 28 | Aichi Virus | tttgaaaaggggggggggggcctcggccccctcaccctcttttccggtggtctggtcccggacc |
| | | accgttactccattcagcttcttcggaacctgttcggaggaattaaacgggcacccatactcccccc |
| | | accccccttttgtaactaagtatgtgtgctcgtgatcttgactcccacggaacggaccgatccgttgg |
| | | tgaacaaacagctaggtccacatcctcccttcccctgggagggcccccgccctcccacatcctcc |
| | | ccccagcctgacgtatcacaggctgtgtgaagcccccgcgaaagctgctcacgtggcaattgtgg |
| | | gtccccccttcatcaagacaccaggtctttcctccttaaggctagccccggcgtgtgaattcacgttg |
| | | ggcaactagtggtgtcactgtgcgctcccaatctcggccgcggagtgctgttccccaagccaaac |
| | | ccctggcccttcactatgtgcctggcaagcatatctgagaaggtgttccgctgtggctgccaacctg |
| | | gtgacaggtgccccagtgtgcgtaaccttcttccgtctccggacggtagtgattggttaagatttggt |
| | | gtaaggttcatgtgccaacgccctgtgcgggatgaaacctctactgccctaggaatgccaggcag |
| | | gtaccccacctccggggggatctgagcctgggctaattgtctacgggtagtttcatttccaatccttt |
| | | tatgtcggagtc |
| 29 | Hepatitis A Virus | ttcaagaggggtctccggagttttccggaacccctcttggaagtccatggtgaggggacttgatac |
| | HA16 | ctcaccgccgtttgcctaggctataggctaaatttccctttccctgtccttcccctatttccttttgttttgt |
| | | ttgtaaatattaattcctgcaggttcagggttctttaatctgtttctctataagaacactcaatttttcacgc |
| | | tttctgtctcctttcttccagggctctccccttgccctaggctctggccgttgcgcccggcggggtca |
| | | actccatgattagcatggagctgtaggagtctaaattggggacgcagatgtttgggacgtcgccttg |
| | | cagtgttaacttggctttcatgaacctctttgatcttccacaaggggtaggctacgggtgaaacctctt |
| | | aggctaatacttcaatgaagagatgccttggatagggtaacagcggcggatattggtgagttgttaa |
| | | gacaaaaaccattcaacgccggaggactggctctcatccagtggatgcattgagggaattgattgt |
| | | cagggctgtctctaggtttaatctcagacctctctgtgcttagggcaaacactatttggccttaaatgg |
| | | gatcctgtgagagggggtccctccattgacagctggactgttctttggggccttatgtggtgtttgcc |
| | | tctgaggtactcaggggcatttaggtttttcctcattcttaaataata |
| 30 | Phopivirus | gggagtaaacctcaccaccgtttgccgtggtttacggctacctatttttggatgtaaatattaattcctg |
| | | caggttcaggtctcttgaattatgtccacgctagtggcactctcttacccataagtgacgccttagcg |
| | | gaacctttctacacttgatgtggttaggggttacattatttccctgggccttctttggccctttttcccctg |
| | | cactatcattctttcttccgggctctcagcatgccaatgttccgaccggtgcgcccgccggggttaa |
| | | ctccatggttagcatggagctgtaggccctaaaagtgctgacactggaactggactattgaagcat |
| | | acactgttaactgaaacatgtaactccaatcgatcttctacaaggggtaggctacgggtgaaacccc |
| | | ttaggttaatactcatattgagagatacttctgataggttaaggttgctggataatggtgagtttaacga |
| | | caaaaaccattcaacagctgtgggccaacctcatcaggtagatgcttttggagccaagtgcgtagg |
| | | ggtgtgtgtggaaatgcttcagtggaaggtgccctcccgaaaggtcgtaggggtaatcaggggca |
| | | gttaggtttccacaattacaatttgaa |
| 31 | CVA10 | gctcttccgatctgggttgttcccacccacagggcccactgggcgccagcactctgattccacgga |
| | | atctttgtgcgcctgttttacaacccttcccaatttgtaacgtagaagcaatacacactactgatcaata |
| | | gtaggcatggcgcgccagtcatgtcatgatcaagcacttctgttcccccggactgagtatcaataga |
| | | ctgctcacgcggttgaaggagaaaacgttcgttacccggctaactacttcgagaaacctagtagca |
| | | ccatggaagctgcggagtgtttcgctcagcactttccccgtgtagatcaggtcgatgagtcactgca |
| | | atccccacgggcgaccgtggcagtggctgcgttggcggcctgcctatggggcaacccataggac |
| | | gctctaatgtggacatggtgcgaagagtctattgagctagttagtagtcctccggcccctgaatgcg |
| | | gctaatcctaactgcggagcacatgccttcaacccaggaggtggtgtgtcgtaacgggtaactctg |
| | | cagcggaaccgactactttgggtgtccgtgtttccttttatccttatattggctgcttatggtgacaatc |
| | | acggaattgttgccatatagctattggattggccatccggtgtctaacagagctattgtatacctatttg |
| | | ttggatttactcccctatcatacaaatctctgaacactttgtgctttatactgaacttaaacacacgaaa |
| 32 | Enterovirus C | ttaaaacagctctggggttgttcccaccccagaggcccacgtggcggccagtacaccggtaccac |
| | | ggtacccttgtacgcctgttttatactcccctccccgtaaactagaagcacgaaacacaagttcaata |
| | | gaagggggtacagaccagtaccaccacgaacaagcacttctgttcccccggtgaggtcacatag |
| | | actgtccccacggtcaaaagtgactgatccgttatccgctcacgtacttcggaaagcctagtaccac |
| | | cttggaatctacgatgcgttgcgctcagcactcgaccccggagtgtagcttaggctgatgagtctg |
| | | gacgttccccactggtgacagtggtccaggctgcgttggcggcctacctgtggtccaaaaccaca |
| | | ggacgctagtagtgaacaaggtgtgaagagcccactgagctacctgagaatcctccggcccctg |
| | | aatgcggctaatcccaaccacggagcaggtaatcgcaaaccagcggtcagcctgtcgtaacgcg |
| | | taagtctgtggcggaaccgactactttgggtgtccgtgtttccttttatttttatggtggctgcttatggt |
| | | gacaatcatagattgttatcataaagcaaattggattggccatccggagtgagctaaactatctatttc |
| | | tctgagtgttggattcgtttcacccacattctgaacaatcagcctcattagtgttaccctgttaataaga |
| | | cgatatcatcacg |
| 33 | Enterovirus D | ttaaaacagctctggggttgttcccaccccagaggcccacgtggcggctagtactccggtacccc |
| | | ggtacccttgtacgcctgttttatactccctttcccaagtaactttagaagaaataaactaatgttcaac |
| | | aggagggggtacaaaccagtaccaccacgaacacacacttctgtttccccggtgaagttgcatag |
| | | actgtacccacggttgaaagcgatgaatccgttacccgcttaggtacttcgagaagcctagtatcat |
| | | cttggaatcttcgatgcgttgcgatcagcactctaccccgagtgtagcttgggtcgatgagtctgga |
| | | caccccacaccggcgacgtggtccaggctgcgttggcggcctacccatggctagcaccatggga |
| | | cgctagttgtgaacaaggtgcgaagagcctattgagctacctgagagtcctccggcccctgaatgc |
| | | ggctaatcccaaccacggagcaaatgctcacaatccagtgagtggtttgtcgtaatgcgcaagtct |
| | | gtggcggaaccgactactttgggtgtccgtgtttccttttatttttattatggctgcttatggtgacaatct |
| | | gagattgttatcatatagctattggattagccatccggtgatatcttgaaattttgccataactttttcaca |
| | | aatcctacaacattacactacactttctcttgaataattgagacaactcata |
| 34 | Enterovirus J | ttaaaatagcctcagggttgttcccaccctgagggcccacgtggtgtagtactctggtattacggtac |
| | | ctttgtacgcctattttatacccccttccccaagtaatttagaagcaagcacaaaccagttcagtagta |
| | | agcagtacaatccagtactgtaatgaacaagtacttctgttaccccggaagggtctatcggtaagct |
| | | gtacccacggctgaagaatgacctaccgttaaccggctacctacttcgagaagcctagtaatgccg |
| | | ttgaagttttattgacgttacgctcagcacactaccccgtgtgtagttttggctgatgagtcacggcac |
| | | tccccacgggcgaccgtggccgtggctgcgttggcggccaaccaaggagtgcaagctccttgga |
| | | cgtcatattacagacatggtgtgaagagcctattgagctaggtggtagtcctccggcccctgaatgc |
| | | ggctaatcctaactccggagcatatcggtgcgaaccagcacttggtgtgttgtaatacgtaagtctg |
| | | gagcggaaccgactactttgggtgtccgtgtttcctgttttaacttttatggctgcttatggtgacaattt |
| | | aacattgttaccatatagctgttgggttggccatccggattttgttataaaaccatttcctcgtgccttga |
| | | cctttaacacatttgtgaacttctttaaatcccttttattagtccttaaatactaaga |
| 35 | Human Pegivirus | aactgttgttgtagcaatgcgcatattgctacttcggtacgcctaattggtaggcgcccggccgacc |
| | 2 | ggccccgcaagggcctagtaggacgtgtgacaatgccatgagggatcatgacactggggtgag |
| | | cggaggcagcaccgaagtcgggtgaactcgactcccagtgcgaccacctggcttggtcgttcatg |
| | | gagggcatgcccacgggaacgctgatcgtgcaaagggatgggtccctgcactggtgccatgcg |
| | | cggcaccactccgtacagcctgatagggtggcggcgggcccccccagtgtgacgtccgtggag |
| | | cgcaac |
| 36 | GBV-C GT110 | tgacgtgggggggttgatTTTccccccccggcactgggtgcaagccccagaaaccgacgcct |
| | | atctaagtagacgcaatgactcggcgccgactcggcgaccggccaaaaggtggtggatgggtga |
| | | tgacagggttggtaggtcgtaaatcccggtcatcctggtagccactataggtgggtcttaagagaa |
| | | ggtcaagattcctcttacgcctgcggcgagaccgcgcacggtccacaggtgttggccctaccggt |
| | | gtgaataagggcccgacatcaggc |
| 37 | GBV-C K1737 | gacgtgggggggttgatccccccccTTTggcactgggtgcaagccccagaaaccgacgccta |
| | | tttaaacagacgttaagaaccggcgccgacccggcgaccggccaaaaggtggtggatgggtgat |
| | | gccagggttggtaggtcgtaaatcccggtcatcttggtagccactataggtgggtcttaagggttgg |
| | | ttaaggtccctctggcgcttgtggcgagaaagcgcacggtccacaggtgttggccctaccggtgt |
| | | gaataagggcccgacgtcaggctcgtcgttaaaccgagcccactacccacctgggcaaacaacg |
| | | cccacgtacggtccacgtcgcccttcaatgtctctcttgaccaataggcttagccggcgagttgaca |
| | | aggaccagtgggggctgggcggtaggggaaggacccctgccgctgcccttcccggtggagtg |
| | | ggaaatgc |
| 38 | GBV-C Iowa | tgacgtgggggggttgatccGccccccccggcactCggtgcaagccccataaaccgacgccta |
| | | tctaagtagacgcaatgactcggcgccgactcggcgaccggccaaaaggtggtggatgggtggt |
| | | gacagggttggtaggtcgtaaatcccggtcatcctggtagccactataggtgggtcttaagagaag |
| | | gtcaagactcctcttgtgcctgcggcgagaccgcgcacggtccacaggtgctggccctaccggtg |
| | | tgaataagggcccgacgtcaggctcgtcgttaaaccgagcccgtcacccacctgggcaaacgac |
| | | gcccacgtacggtccacgtcgcccttca |
| 39 | Pegivirus A 1220 | tgtagcaatgcgcatattgctacttcggtacgcctaattggtaggcgcccggccgaccggccccgc |
| | | aagggcctagtaggacgtgtgacaatgccatgcgggatcatgacactggggtgagcggaggca |
| | | gcaccgaagtcgggtgaactcgactcccagtgcgaccacctggcttggtcgttcatggagggcat |
| | | gcccacgggaacgctgatcgtgcaaagggatgggtccctgcactggtgccatgcgcggcacca |
| | | ctccgtacagcctgatagggtggcggcgggcccccccagtgtgacgtccgtggagcgcaac |
| 40 | Pasivirus A 3 | attttctggccgtgtagctgcttttgaccagtggctctgggttacttagccaaatcccccttccttcacc |
| | | cttttaaatttgatggtctgtgttgtttgttttgtcttgtctaaataatatataagatccttcccgccgataca |
| | | gacctcgacagtctggtgtaggagggttggtgttattaatttgccccagaagagtgaccgtgacac |
| | | atagaaaccatgagtacatgtgtatccgtggaggatcgcccgggactggattccatatcccattgcc |
| | | atcccaacaagcggagggtatacccactatgtgcgcgtttgcagtgggaatctgcaaatttagtcat |
| | | actgcctgatagggtgtgggcctgcactctggggtactcaggctgttcatataat |
| 41 | Sapelovirus | cccctccacccttaaggtggttgtatcccacataccccaccctcccttccaaagtggacggacaact |
| | | ggattttgactaacggcaagtctgaatggtatgatttggatacgtttaaacggcagtagcgtggcga |
| | | gctatggaaaaatcgcaattgtcgatagccatgttagtgacgcgcttcggcgtgctcctttggtgatt |
| | | cggcgactggttacaggagagtaggcagtgagctatgggcaaacctctacagtattacttagagg |
| | | gaatgtgcaattgagacttgacgagcgtctctttgagatgtggcgcatgctcttggcattaccatagt |
| | | gagcttccaggttgggaaacctggactgggcctatactacctgatagggtcgcggctggccgcct |
| | | gtaactagtatagtcagttgaaaccccccc |
| 42 | Rosavirus B | gtctctttagtgtctatgcttcagagagcggtgaactgacaccgttgcttcttgcacagcccttcgtgc |
| | | cggtctttccggttctcgacagcgttgggcatcatggctagttaggctaagatagtggatgatctagt |
| | | gaacagttttggattgtttggagttttgtagcgatgctagtagtgtgtgtggacctccccacgtggtaa |
| | | cacgtgccccacaggccaaaagccaaggtgttgaaagcacccctactagtcccagactcacccat |
| | | ctgggaactcctctcatgaaaaatcttagtaacttttgattcggctattcatcaacctctctagtcaagg |
| | | gctgaaggatgcccggaaggtacccgcaggtaacgataagctcactgtggatctgatccggggc |
| | | tttggtgcgaccgtctgtccggcgtagccagagttaaaaaacgtctaggcccttccaccccaaggg |
| | | attggggtttccccaatcatttgaaagttcact |
| 43 | Bakunsa Virus | ttttgaacgccacctcggagcgatatccggggaccccctcccctttttccttcctaccttcttcccaaa |
| | | tttccctcttcccttgttattttggtttggatttcctggacatgactcggacggatctatctcatttgctttgt |
| | | gtctgctccaccagtggcatggtcgaaagatcatcaacactggacgtgtactgtaatggccaaacg |
| | | tgcccacaggggaaaccatgccggtcgctgtagcggcgggtggacgtggtggacccctctccct |
| | | gctcataaactttgggtaggtgaagggttcaagcgacgcttgccgtgagggcgcatccggatggt |
| | | gggaaccaacaaactaggctgtaatggccgacctcaggtggatgagctagggctgctgcaccaa |
| | | aagggactcgattcgatatcccggcctggtagcctagtgcagtggactcgtagttgggaatctacg |
| | | actggcctagtacagggtgatagccccgtttcccacgcccacctgttgtagggacacccccccc |
| 44 | Tremovirus A | tttgaaagaggcctccggagtgtccggaggctctctttcgacccaacccatactggggggtgtgtg |
| | | ggaccgtacctggagtgcacggtatatatgcattcccgcatggcaagggcgtgctaccttgcccct |
| | | tgacgcatggtatgcgtcatcatttgccttggttaagccccatagaaacgaggcgtcacgtgccga |
| | | aaatccctttgcgtttcacagaaccatcctaaccatgggtgtagtatgggaatcgtgtatggggatga |
| | | ttaggatctctcgtagagggataggtgtgccattcaaatccagggagtactctggctctgacattgg |
| | | gacatttgatgtaaccggacctggttcagtatccgggttgtcctgtattgttacggtgtatccgtcttgg |
| | | cacactgaaagggtatttttgggtaatcctttcctactgcctgatagggtggcgtgcccggccacga |
| | | gagattaagggtagcaatttaaac |
| 45 | Swine Pasivirus 1 | gcttttgaccagtggctctgggttacttagccaagtccctttctcttattttcactagtttatgttgtgtgtt |
| | | gtctgttttgttttgtttaaattgtatacaagatccttcccgccgacacagacctcgacagtctggtgta |
| | | ggagggttggtgatattaatttgccccaaaagagtgaccgtgatacgtggaaaccatgagtacatgt |
| | | gtatccgtggaggatcgcccgggactggattccatatcccattgccatcccaacaaacggagggt |
| | | atacccaccacgtgcgcgtttgcagtgggaatctgcaaatttagtcatactgcctgatagggtgtgg |
| | | gcctgcactttggggtactcaggctgttcatataat |
| 46 | PLV-CHN | acatggggtatgttgtctgtcctgttttgttgaaacaatatataagatcctttccgccgatatagacctc |
| | | gacagtctagtgtaggaggattggtgatagtaacttgccccagaagagtgaccgtgacacataga |
| | | aaccatgagtacatgtgtatccgtggaggatcgcccgggactggattccatatcccattgccatccc |
| | | aacaaacggagggtatacccactatgtgcgcgtttgcagtgggagcctgcaaatttagtcatactg |
| | | cctgatagggtgtgggcctgcactctggggtactcaggctgtttatataat |
| 47 | Pasivirus A | tgaaaaagtggttgtgcagctggattttccggctgtgcaactgcttttgaccagtggctctgggttact |
| | (longer) | tagccaaattcctttcccttatccctattggtttgtgttgtgtgttgtttgttttgttttgtcttaactatataca |
| | | agatccttcccgccgatacagacctcgacagtctggtgtaggagggttggtgttattaatttgcccca |
| | | aaagagtgaccgtgacacgtggaaaccatgagtacatgtgtatccgtggaggatcgcccgggact |
| | | ggattccatatcccattgccatcccaacaaacggagggtatacccaccacgtgcgcgtttgcagtg |
| | | ggaatctgcaaatttagtcatactgcctgatagggtgtgggcctgcactttggggtactcaggctgtt |
| | | tatataat |
| 48 | Sicinivirus | gtgtcattaaggtgtgtttggaagttcgaattagctggtttgtggtgattagtagaccccctggaggta |
| | | cccaattcggatctgaccagggacccgtgactataccgctccggtaattcgggtttaaaacaatga |
| | | acgtcaccacacaattacttttctcattttattttcatcattgtcttcctatttaccgattacactcgatttcct |
| | | tggatgttcctggagatttccctggttacctggaccctcattattgttgttgtttcacccagcgagctgt |
| | | cccaattgcttattatttgcgcttacaacttcgtcctaatatttttctggttgatcgggttgattgagctcc |
| | | cgggctatcctgccattcaac |
| 49 | Hepacivirus K | gggaacaatggtccgtccgcggaacgactctagccatgagtctagtacgagtgcgtgccacccat |
| | | tagcacaaaaaccactgactgagccacacccctcccggaatcctgagtacaggacattcgctcgg |
| | | acgacgcatgagcctccatgccgagaaaattgggtatacccacgggtaaggggggccacccag |
| | | cgggaatctgggggctggtcactgactatggtacagcctgatagggtgctgccgcagcgtcagtg |
| | | gtatgcggctgttcatggaac |
| 50 | Hepacivirus A | acctccgtgctaggcacggtgcgttgtcagcgttttgcgcttgcatgcgctacacgcgtcgtccaac |
| | | gcggagggaacttcacatcaccatgtgtcactccccctatggagggttccaccccgcttacacgga |
| | | aatgggttaaccatacccaaagtacgggtatgcgggtcctcctagggcccccccggcaggtcga |
| | | gggagctggaattcgtgaattcgtgagtacacgaaaatcgcggcttgaacgtctttgaccttcgga |
| | | gccgaaatttgggcgtgccccacgaaggaaggcgggggcggtgttgggccgccgccccctttat |
| | | cccacggtctgataggatgcttgcgagggcacctgccggtctcgtagaccataggac |
| 51 | BVDV1 | gtatacgagaatttgcctaggacctcgtttacaatatgggcaatctaaaattataattaggcctaagg |
| | | gacaaatcctcctcagcgaaggccgaaaagaggctagccatgcccttagtaggactagcaaaata |
| | | aggggggtagcaacagtggtgagttcgttggatggctgaagccctgagtacagggtagtcgtcag |
| | | tggttcgacgcttcggaggacaagcctcgagataccacgtggacgagggcatgcccacagcaca |
| | | tcttaacctggacgggggtcgttcaggtgaaaacggtttaaccaaccgctacgaatacagcctgat |
| | | agggtgctgcagaggcccactgtattgctactgaaaatctctgctgtacatggcac |
| 52 | Border Disease | gtatacgggagtagctcatgcccgtatacaaaattggatattccaaaactcgattgggttagggagc |
| | Virus | cctcctagcgacggccgaaccgtgttaaccatacacgtagtaggactagcagacgggaggacta |
| | | gccatcgtggtgagatccctgagcagtctaaatcctgagtacaggatagtcgtcagtagttcaacg |
| | | caggcacggttctgccttgagatgctacgtggacgagggcatgcccaagacttgctttaatctcgg |
| | | cgggggtcgccgaggtgaaaacacctaacggtgttggggttacagcctgatagggtgctgcaga |
| | | ggcccacgaataggctagtataaaaatctctgctgtacatggcac |
| 53 | BVDV2 | gtatacgagattagctaaagtactcgtatatggattggacgtcaacaaatttttaattggcaacgtagg |
| | | gaaccttcccctcagcgaaggccgaaaagaggctagccatgccctttagtaggactagcaaaagt |
| | | agggggactagcggtagcagtgagttcgttggatggccgaacccctgagtacaggggagtcgtc |
| | | aatggttcgacactccattagtcgaggagtctcgagatgccatgtggacgagggcatgcccacgg |
| | | cacatcttaacccatgcgggggttgcatgggtgaaagcgctaatcgtggcgttatggacacagcct |
| | | gatagggtgtagcagagacctgctattccgctagtaaaaaactctgctgtacatggcac |
| 54 | CSFV-PK15C | gtatacgaggttagttcattctcgtatgcattattggacaaatcaaaatttcaatttggttcagggcctc |
| | | cctccagcgacggccgaactgggctagccatgcccatagtaggactagcaaacggagggacta |
| | | gccgtagtggcgagctccctgggtgttctaagtcctgagtacaggacagtcgtcagtagttcgacg |
| | | tgagcagaagcccacctcgagatgctatgtggacgagggcatgcccaagacgcaccttaaccct |
| | | agcgggggtcgctagggtgaaatcacaccacgtgatgggagtccgacctgatagggtgctgcag |
| | | aggctcactattaggctagtataaaaatctctgctgtacatggcac |
| 55 | SF573 | aaaaccgaccccagagatcagaaagtcgttgacgcgatcttttattagaggacgttgcgctggcgc |
| | Dicistrovirus | gagctttaattagcagacgccaaaaataaacaacaaaatgctgatcgcgagacttaattgtcagac |
| | | gattggccaaatccgatgtgatctttgctgctcccagattgccgaaataggagtagtag |
| 56 | Hubei Picorna- | ccccaaaaccccccccttaaactcaacactgtagtggattcattttccgttgcaaaacaaaacattac |
| | like Virus | tacccgcatttatgtaggctctgtgttttctatgcgaccgttacattaatctctactctgacccactagttt |
| | | ataaaaccgaagacctgaatgaaacgattttccttcttttcaacctctaacgaacctctgacggcttga |
| | | gaaacctgaagttagtaattatgtttaaaagaaaggaaagtcaaacgcgatgactcttacatccctat |
| | | tccataccgttgctccacaatgtgagcgatgcgaggtcgggactgcagtattaggggaacgagct |
| | | acatggagagttaattatctctcccctcctacgggagtctcatgtgagctgtagaaagcggttggca |
| | | cctctcgttacctcgcctgtacatgatcc |
| 57 | CRPV | aaaagcaaaaatgtgatcttgcttgtaaatacaattttgagaggttaataaattacaagtagtgctatttt |
| | | tgtatttaggttagctatttagctttacgttccaggatgcctagtggcagccccacaatatccaggaag |
| | | ccctctctgcggtttttcagattaggtagtcgaaaaacctaagaaatttacct |
| 58 | Salivirus A BN5 | tttcctcctttcgaccgccttacggcaggcgggtccgcggacggcttcggcctacccgcgacaag |
| | | aatgccgtcatctgtccttatcacccatattctttcccttcccccgcaaccatcacgcttactcgcgca |
| | | cgtgttgagtggcacgtgcgttgtccaaacagttacactcacacccttggggcgggtttgtcccgcc |
| | | ctcgggttcctcgcggaaccctccctcttctctctccctttctatccgccttcactttccataactacagt |
| | | gctttggtaggtaagcatcctgaccccccgcggaagctgccaacgtggcaactgtggggatccag |
| | | gcaggttatcaaaggcacccggtctttccgccttcaggagtatccctgccggtgaattccgacagg |
| | | gctctgcttggtgccaacctcccccaaatgcgcgctgcgggagtgctcttccccaactcatcttagt |
| | | aacctctcatgtgtgtgcttggtcagcatatctgaggcgacgttccgctgtcccagaccagtccagc |
| | | aatggacgggccagtgtgcgtagtcgctttccggtttcccggcgcatgtttggcgaaacgctgagg |
| | | taaggttggtgtgcccaatgcccgtaatttggtgacacctcaagaccacccaggaatgccaggga |
| | | ggtaccccacttcggtgggatctgaccctgggctaattgtctacggtggttcttcttgcttccacttctc |
| | | ttttttctggcatg |
| 59 | Salivirus A BN2 | tatggcaggcgggcttgtggacggcttcggcccacccacagcaagaatgccatcatctgtcctca |
| | | cccccatgtttcccctttctttccctgcaaccgttacgcttactcgcaggtgcatttgagtggtgcacgt |
| | | gttgaataaacagctacactcacatggggggggttttcccgccctgcggcctctcgcgaggccc |
| | | acccctccccttcctcccataactacagtgctttggtaggtaagcatcctgatcccccgcggaagct |
| | | gctcacgtggcaactgtggggacccagacaggttatcaaaggcacccggtctttccgccttcagg |
| | | agtatccctgctagtgaattctagtagggctctgcttggtgccaacctcccccaaatgcgcgctgcg |
| | | ggagtgctcttccccaactcaccctagtatcctctcatgtgtgtgcttggtcagcatatctgagacgat |
| | | gttccgctgtcccagaccagtccagtaatggacgggccagtgtgcgtagtcgtcttccggcttttcc |
| | | ggcgcatgtttggtgaaccggtggggtaaggttggtgtgcccaacgcccgtactttggtgatacct |
| | | caagaccacccaggaatgccagggaggtaccccgcttcacagcgggatctgaccctgggctaat |
| | | tgtctacggtggttcttcttgcttccacttctttctactgttc |
| 60 | Salivirus A | tttcgaccgccttatggcaggcgggcttgtggacggcttcggcccacccacagcaagaatgccat |
| | 02394 | catctgtcctcacccccatttctcccctccttcccctgcaaccattacgcttactcgcatgtgcattgag |
| | | tggtgcacgtgttgaacaaacagctacactcacgtggggggggttttcccgcccttcggcctctc |
| | | gcgaggcccacccttccccttcctcccataactacagtgctttggtaggtaagcatcctgatccccc |
| | | gcggaagctgctcgcgtggcaactgtggggacccagacaggttatcaaaggcacccggtctttcc |
| | | gcctccaggagtatccctgctagtgaattctagtggggctctgcttggtgccaacctcccccaaatg |
| | | cgcgctgcgggagtgctcttccccaactcaccctagtatcctctcatgtgtgtgcttggtcagcatat |
| | | ctgagacgatgttccgctgtcccagaccagtccagcaatggacgggccagtgtgcgtagtcgtctt |
| | | ccggcttgtccggcgcatgtttggtgaaccggtggggtaaggttggtgtgcccaacgcccgtactt |
| | | tggtgacaactcaagaccacccaggaatgccagggaggtaccccgcctcacgggggatctga |
| | | ccctgggctaattgtctacggtggttcttcttgcttccatttctttcttctgttc |
| 61 | Salivirus A GUT | tatggcaggcgggcttgtggacggtttcggcccacccacagcaagaatgccatcatctgtcctcac |
| | | ccccaattttccctttcttcccctgcaatcatcacgcttactcgcatgtgcattgagtggtgcatgtgtt |
| | | gaacaaacagctacactcacatggggggggttttcccgccctacggcctctcgcgaggcccac |
| | | ccttcccctccccttataactacagtgctttggcaggtaagcatcctgatcccccgcggaagctgct |
| | | cacgtggcaactgtggggacccagacaggttatcaaaggcacccggtctttccgccttcaggagc |
| | | atccccactagtgaattctagtggggctctgcttggtgccaacctcccccaaatgcgcgctgcggg |
| | | agtgctcttccccaacccatcctagtatcctctcatgtgtgtgcttggtcagcatatctgagacgacgt |
| | | tccgctgtcccagaccagtccagtaatggacgggccagtgtgcgtagtcgtcttccggcttgtccg |
| | | gcgcatgtttggtgaaccggtggggtaaggttggtgtgcccaacgcccgtactttggtgacacctc |
| | | aagaccacccaggaatgccagggaggtaccccgcctcacggcgggatctgaccctgggctaatt |
| | | gtctacggtggttcttcttgcttccacttctttctt |
| 62 | Salivirus A CH | ttctcctgcaaccattacgcttaatcgcatgtgcattgagtggtgcatgtgttgaacaaacagctaca |
| | | atcacatggggggggttttcccgccccacggcttctcgcgaggcccatccctcccttttctcccat |
| | | aactacagtgctttggtaggtaagcatcccgatctcccgcggaagctgctcacgtggcaactgtgg |
| | | ggacccagacaggttatcaaaggcacccggtctttccgccttcaggagtatccctgctagcgaatt |
| | | ctagtagggctctgcttggtgccaacctctcccaaatgcgcgctgcgggagtgctcttccccaaatc |
| | | accccagtatcctctcatgtgtgtgcctggtcagcatatctgagacgatgttccgctgtcccagacca |
| | | gtccagtaatggacgggccagtgtgcgtagtcgtcctccggcttgtccggcgcatgtttggtgaac |
| | | cggtggggtaaggttggtgtgcccaacgcccgtaatcaggggatacctcaaggcacccaggaat |
| | | gccagggaggtatcccgcctcacagcgggatctgaccctggggtaaatgtctgcggggggtcct |
| | | cttggcccaattctcagtaattttcagg |
| 63 | Salivirus A SZ1 | tctgtcctcaccccatcttcccttctttcctgcaccgttacgcttactcgcatgtgcattgagtggtgca |
| | | cgtgcttgaacaaacagctacactcacatggggggggttttcccgccctgcggcctctcgcgag |
| | | gcccacccctccccttcctcccataactacagtgctttggtaggtaagcatcctgatcccccgcgga |
| | | agctgctcacgtggcaactgtggggacccagacaggttatcaaaggcacccggtctttccgccttc |
| | | aggagtatccctgctagtgaattctagtagggctctgcttggtgccaacctcccccaaatgcgcgct |
| | | gcgggagtgctcttccccaactcaccctagtatcctctcatgtgtgtgcttggtcagcatatctgaga |
| | | cgatgttccgctgtcccagaccagtccagtaatggacgggccagtgtgcgtagtcgtcttccggctt |
| | | gtccggcgcatgtttggtgaaccggtggggtaaggttggtgtgcccaacgcccgtactttggtgat |
| | | acctcaagaccacccaggaatgccagggaggtaccccgcttcacaggggatctgaccctggg |
| | | ctaattgtctacggtggttcttcttgcttccacttctttctactgttcatg |
| 64 | Salivirus FHB | acatggggggtctgcggacggcttcggcccacccgcgacaagaatgccgtcatctgtcctcatta |
| | | cccgtattccttcccttcccccgcaaccaccacgcttactcgcgcacgtgttgagtggcacgtgcgt |
| | | tgtccaaacagctacacccacacccttcggggcgggtttgtcccgccctcgggttcctcgcggaa |
| | | cccccccctccctctctctctttctatccgccctcacttcccataactacagtgctttggtaggtgagc |
| | | accctgaccccccgcggaagctgctaacgtggcaactgtggggatccaggcaggttatcaaagg |
| | | cacccggtctttccgccttcaggagtatctctgccggtgaattccggtagggctctgcttggtgcca |
| | | acctcccccaaatgcgcgctgcgggagtgctcttccccaactcatcttagtaacctctcatgtgtgtg |
| | | cttggtcagcatatctgaggcgacgttccgctgtcccagaccagtccagcaatggacgggccagt |
| | | gtgcgtagtcgctttccggttttccggcgcatgtttggcgaaacgctgaggtaaggttggtgtgccc |
| | | aacgcccgtaatttggtgatacctcaagaccacccaggaatgccagggaggtaccccacttcggt |
| | | gggatctgaccctgggctaattgtctacggtggttcttcttgcttccacttctcttttttctggcatg |
| 65 | CVB3 | ttaaaacagcctgtgggttgatcccacccacaggcccattgggcgctagcactctggtatcacggt |
| | | acctttgtgcgcctgttttataccccctcccccaactgtaacttagaagtaacacacaccgatcaaca |
| | | gtcagcgtggcacaccagccacgttttgatcaagcacttctgttaccccggactgagtatcaataga |
| | | ctgctcacgcggttgaaggagaaagcgttcgttatccggccaactacttcgaaaaacctagtaaca |
| | | ccgtggaagttgcagagtgtttcgctcagcactaccccagtgtagatcaggtcgatgagtcaccgc |
| | | attccccacgggcgaccgtggcggtggctgcgttggcggcctgcccatggggaaacccatggg |
| | | acgctctaatacagacatggtgcgaagagtctattgagctagttggtagtcctccggcccctgaatg |
| | | cggctaatcctaactgcggagcacacaccctcaagccagagggcagtgtgtcgtaacgggcaac |
| | | tctgcagcggaaccgactactttgggtgtccgtgtttcattttattcctatactggctgcttatggtgac |
| | | aattgagagatcgttaccatatagctattggattggccatccggtgactaatagagctattatatatcc |
| | | ctttgttgggtttataccacttagcttgaaagaggttaaaacattacaattcattgttaagttgaatacag |
| | | caaa |
| 66 | CVB1 | ttaaaacagcctgtgggttgttcccacccacaggcccattgggcgctagcactctggtatcacggta |
| | | cctttgtgcgcctgttttacatcccctccccaaattgtaatttagaagtttcacacaccgatcattagca |
| | | agcgtggcacaccagccatgttttgatcaagcacttctgttaccccggactgagtatcaatagaccg |
| | | ctaacgcggttgaaggagaaaacgttcgttacccggccaactacttcgaaaaacctagtaacacca |
| | | tggaagttgcggagtgtttcgctcagcactaccccagtgtagatcaggtcgatgagtcaccgcgttc |
| | | cccacgggcgaccgtggcggtggctgcgttggcggcctgcctacggggaaacccgtaggacg |
| | | ctctaatacagacatggtgcgaagagtctattgagctagttggtaatcctccggcccctgaatgcgg |
| | | ctaatcctaactgcggagcacataccctcaaaccagggggcagtgtgtcgtaacgggcaactctg |
| | | cagcggaaccgactactttgggtgtccgtgtttcattttattcctatactggctgcttatggtgacaatt |
| | | gacaggttgttaccatatagttattggattggccatccggtgactaacagagcaattatatatctctttg |
| | | ttgggtttataccacttagcttgaaagaggttaaaacactacatctcatcattaaactaaatacaacaa |
| | | a |
| 67 | Echovirus 7 | ttaaaacagcctgtgggttgttcccacccacagggcccattgggcgtcagcaccctggtatcacgg |
| | | tacctttgtgcgcctgttttatatcccttcccccaattgtaacttagaagaaacacacaccgatcaaca |
| | | gcaagcgtggcacaccagccatgttttggtcaagcacttctgttaccccggactgagtatcaataga |
| | | ctgctcacgcggttgaaggagaaagcgtccgttatccggccagctacttcgagaaacctagtaac |
| | | accatggaagttgcggagtgtttcgctcagcactaccccagtgtagatcaggtcgatgagtcaccg |
| | | ctttccccacgggcgaccgtggcggtggctgcgttggcggcctgcctatgggggaacccatagg |
| | | acgctctaatacagacatggtgcgaagagtctattgagctagctggtattcctccggcccctgaatg |
| | | cggctaatcctaactgtggagcacatgcccctaatccaaggggtagtgtgtcgtaatgagcaattcc |
| | | gcagcggaaccgactactttgggtgtccgtgtttcctcttattcttgtactggctgcttatggtgacaat |
| | | tgagagattgttaccatatagctattggattggccatccggtgactaatagagctattgtgtatctcttt |
| | | gttggatttgtaccacttaatttgaaagaaatcaggacactacgctacattttactattgaacaccgca |
| | | aa |
| 68 | CVB5 | ttaaaacagcctgtgggttgtacccacccacagggcccactgggcgctagcactctggtatcacg |
| | | gtacctttgtgcgcctgttttatgcccccttcccccaattgaaacttagaagttacacacaccgatcaa |
| | | cagcgggcgtggcataccagccgcgtcttgatcaagcactcctgtttccccggaccgagtatcaat |
| | | agactgctcacgcggttgaaggagaaaacgttcgttacccggctaactacttcgagaaacctagta |
| | | gcatcatgaaagttgcgaagcgtttcgctcagcacatccccagtgtagatcaggtcgatgagtcac |
| | | cgcattccccacgggcgaccgtggcggtggctgcgttggcggcctgcctacggggcaacccgt |
| | | aggacgcttcaatacagacatggtgcgaagagtcgattgagctagttagtagtcctccggcccctg |
| | | aatccggctaatcctaactgcggagcacataccctcaacccagggggcattgtgtcgtaacgggt |
| | | aactctgcagcggaaccgactactttgggtgtccgtgtttccttttattcttataatggctgcttatggtg |
| | | acaattgaaagattgttaccatatagctattggattggccatccggtgtctaacagagctattatatac |
| | | ctctttgttggatttgtaccacttgatctaaaggaagtcaagacactacaattcatcatacaattgaaca |
| | | cagcaaa |
| 69 | EVA71 | ttaaaacagcctgtgggttgcacccactcacagggcccactgggcgcaagcactctggcacttcg |
| | | gtacctttgtgcgcctgttttatatcccctcccccaatgaaatttagaagcagcaaaccccgatcaata |
| | | gcaggcataacgctccagttatgtcttgatcaagcacttctgtttccccggactgagtatcaatagac |
| | | tgctcacgcggttgaaggagaaaacgttcgttatccggctaactacttcggaaagcctagtaacac |
| | | catggaagttgcggagagtttcgttcagcacttccccagtgtagatcaggtcgatgagtcaccgcat |
| | | tccccacgggcgaccgtggcggtggctgcgttggcggcctgcccatggggtaacccatgggac |
| | | gctctaatacggacatggtgtgaagagtctactgagctagttagtagtcctccggcccctgaatgcg |
| | | gctaatcccaactgcggagcacacgcccacaagccagtgggtagtgtgtcgtaacgggcaactct |
| | | gcagcggaaccgactactttgggtgtccgtgtttccttttattcttatgttggctgcttatggtgacaatt |
| | | aaagagttgttaccatatagctattggattggccatccggtgtgcaacagagcgatcgtttacctattt |
| | | attggttttgtaccattgacactgaagtctgtgatcacccttaattttatcttaaccctcaacacagccaa |
| | | ac |
| 70 | CVA3 | ttaaaacagcctgtgggttgtacccacccacagggcccactgggcgctagcacactggtattacg |
| | | gtacctttgtgcgcctgttttataccccccccaacctcgaaacttagaagtaaagcaaacccgatca |
| | | atagcaggtgcggcgcaccagtcgcatcttgatcaagcacttctgtaaccccggaccgagtatcaa |
| | | tagactgctcacgcggttgaaggagaaaacgttcgttacccggctaactacttcgagaaacccagt |
| | | agcatcatgaaagttgcagagtgtttcgctcagcactacccccgtgtagatcaggccgatgagtca |
| | | ccgcacttccccacgggcgaccgtggcggtggctgcgttggcggcctgcctatggggcaaccca |
| | | taggacgctctaatacggacatggtgcgaagagtctattgagctagttagtagtcctccggcccctg |
| | | aatgcggctaatcctaactgcggagcacatacccttaatccaaagggcagtgtgtcgtaacgggta |
| | | actctgcagcggaaccgactactttgggtgtccgtgtttccttttaatttttactggctgcttatggtgac |
| | | aattgaggaattgttgccatatagctattggattggccatccggtgactaacagagctattgtgttcca |
| | | atttgttggatttaccccgctcacactcacagtcgtaagaacccttcattacgtgttatttctcaactcaa |
| | | gaaa |
| 71 | CVA12 | ttaaaacagcctgtgggttgtacccacccacagggcccactgggcgctagcactctggtactacg |
| | | gtacctttgtgtgcctgttttaagcccctaccccccactcgtaacttagaaggcttctcacactcgatc |
| | | aatagtaggtgtggcacgccagtcacaccgtgatcaagcacttctgttaccccggtctgagtacca |
| | | ataagctgctaacgcggctgaaggggaaaacgatcgttatccggctaactacttcgagaaaccca |
| | | gtaccaccatgaacgttgcagggtgtttcgctcggcacaaccccagtgtagatcaggtcgatgagt |
| | | caccgtattccccacgggcgaccgtggcggtggctgcgttggcggcctgcccatggggtgaccc |
| | | atgggacgctctaatactgacatggtgcgaagagtctattgagctagttagtagtcctccggcccct |
| | | gaatgcggctaatcctaactgcggagcacatacccttaatccaaagggcagtgtgtcgtaacggg |
| | | caactctgcagcggaaccgactactttgggtgtccgtgtttccttttattcttacattggctgcttatggt |
| | | gacaattgaaaagttgttaccatatagctattggattggccatccggtgacaaatagagctattgtata |
| | | tctttttgttggttacgtaccccttaattacaaagtggtttcaactttgaaatacatcctaacactaaattg |
| | | tagaaa |
| 72 | EV24 | ttaaaacagcctgtgggttgcacccacccacagggcccacagggcgctagcactctggtatcacg |
| | | gtacctttgtgcgcctgttttattaccccttccccaattgaaaattagaagcaatgcacaccgatcaac |
| | | agcaggcgtggcgcaccagtcacgtctcgatcaagcacttctgtttccccggaccgagtatcaata |
| | | gactgctcacgcggttgaaggagaaagtgttcgttatccggctaaccacttcgagaaacccagtaa |
| | | caccatgaaagttgcagggtgtttcgctcagcacttccccagtgtagatcaggtcgatgagtcacc |
| | | gcgttccccacgggcgaccgtggcggtggctgcgttggcggcctgcctatgggttaacccatag |
| | | gacgctctaatacagacatggtgcgaagagtttattgagctggttagtatccctccggcccctgaat |
| | | gcggctaatcctaactgcggagcacgtgcctccaatccagggggttgcatgtcgtaacgggtaac |
| | | tctgcagcggaaccgactactttgggtgtccgtgtttccttttattcttatactggctgcttatggtgaca |
| | | atcgaggaattgttaccatatagctattggattggccatccggtgtctaacagagcgattatatacctc |
| | | tttgttggatttatgcagctcaataccaccaactttaacacattgaaatatatcttaaagttaaacacag |
| | | caaa |
| 348 | AP1.0 | attctcgggctacggccctggagccactccggctcctaaagatttagaagtttgagcacacccgcc |
| | | cactagggccccccatccaggggggcaacgggcaagcacttctgtttccccggtatgatctgata |
| | | ggctgtaaccacggctgaaacagagattatcgttatccgcttcactacttcgagaagcctagtaatg |
| | | atgggtgaaattgaatccgttgatccggtgtctcccccacaccagaaactcatgatgagggttgcca |
| | | tcccggctacggcgacgtagcgggcatccctgcgctggcatgaggcctcttaggaggacggatg |
| | | atatggatcttgtcgtgaagagcctattgagctagtgtcgactcctccgcccccgtgaatgcggcta |
| | | atcctaaccccggagcaggtgggtccaatccagggcctggcctgtcgtaatgcgtaagtctggga |
| | | cggaaccgactactttcgggaaggcgtgtttccatttgttcattatttgtgtgtttatggtgacaactctg |
| | | ggtaaacgttctattgcgtttattgagagattcccaacaattgaacaaacgagaactacctgttttatta |
| | | aatttacacagagaagaattaca |
| 349 | CK1.0 | gtggccacgcccgggccaccgatacttcccttcactccttcgggactgttggggaggaacacaac |
| | | agggctcccctgttttcccattccttcccccttttcccaaccccaaccgccgtatctggtggcggcaa |
| | | gacacacgggtctttccctctaaagcacaattgtgtgtgtgtcccaggtcctcctgcgtacggtgcg |
| | | ggagtgctcccacccaactgttgtaagcctgtccaacgcgtcgtcctggcaagactatgacgtcgc |
| | | atgttccgctgcggatgccgaccgggtaaccggttccccagtgtgtgtagtgcgatcttccaggtc |
| | | ctcctggttggcgttgtccagaaactgcttcaggtaagtggggtgtgcccaatccctacaaaggttg |
| | | attctttcaccaccttaggaatgctccggaggtaccccagcaacagctgggatctgaccggaggct |
| | | aattgtctacgggtggtgtttcctttttcttttcacacaactctactgctgacaactcactgactatccact |
| | | tgctctgTcacG |
| 350 | PV1.0 | aacaaaaggctacaccacttgggctacggcccgcgccaccttgtggcgcaaagacattagaaga |
| | | atagcataccgcccactagggccctgcagccagcagggtaacgggcaagcacttctgtctcccc |
| | | ggtagaacggtataggctgtacccacggccgaaaactgaactatcgttacccgactccgtacttcg |
| | | caaagcttagtaggaaactggaaagttcgagttattgacccggagtgttccccccactccagaaac |
| | | gcgtgatgagggttgccaccccgaccatggcgacatggtgggcatccctgcgctggcacgcgg |
| | | cctctaagaggataactcgctcctactggtaaccgaagagccccgtgagctacggtttattcctccg |
| | | cctccctgaatgcggctaatcctaacccatgagcagttgccatagatccatatggtggactgtcgta |
| | | acgcgtaagttgtgggcggaaccgactactttgggatggcgtgtttccttgttttctccatttgttgttgt |
| | | atggtgacaagttatagatctcgatctatagcgtttcttgagagatttccaaacatttattcaagtcgta |
| | | caattcttgtgtttaagcagtacagtgtaacc |
| 351 | SV1.0 | tctgtcctcaccccatcttcccttctttcctgcaccgttacgcttactcgcatgtgcattgagtggtgca |
| | | cgtgcttgaacaaacagctacactcacatggggggggttttcccgccctgcggcctctcgcgag |
| | | gcccacccctccccttcctcccataactacagtgctttggtaggtaagcatcctgatcccccgcgga |
| | | agctgctcacgtggcaactgtggggacccagacaggttatcaaaggcacccggtctttccgccttc |
| | | aggagtatccctgctagtgaattctagtagggctctgcttggtgccaacctcccccaaatgcgcgct |
| | | gcgggagtgctcttccccaactcaccctagtatcctctcatgtgtgtgcttggtcagcatatctgaga |
| | | cgatgttccgctgtcccagaccagtccagtaatggacgggccagtgtgcgtagtcgtcttccggctt |
| | | gtccggcgcatgtttggtgaaccggtggggtaaggttggtgtgcccaacgcccgtactttggtgat |
| | | acctcaagaccacccaggaatgccagggaggtaccccgcttcacagcgggatctgaccctggg |
| | | ctaattgtctacggtggttcttcttgcttccacttctttctactgttcgccacc |
| 352 | Caprine | gtggccacgcccgggccaccgatacttcccttcactccttcgggactgttggggaggaacacaac |
| | Kobuvirus 5Δ40 | agggctcccctgttttcccattccttcccccttttcccaaccccaaccgccgtatctggtggcggcaa |
| | | gacacacgggtctttccctctaaagcacaattgtgtgtgtgtcccaggtcctcctgcgtacggtgcg |
| | | ggagtgctcccacccaactgttgtaagcctgtccaacgcgtcgtcctggcaagactatgacgtcgc |
| | | atgttccgctgcggatgccgaccgggtaaccggttccccagtgtgtgtagtgcgatcttccaggtc |
| | | ctcctggttggcgttgtccagaaactgcttcaggtaagtggggtgtgcccaatccctacaaaggttg |
| | | attctttcaccaccttaggaatgctccggaggtaccccagcaacagctgggatctgaccggaggct |
| | | aattgtctacgggtggtgtttcctttttttttcacacaactctactgctgacaactcactgactatccact |
| | | tgctctcttgtgcctttctgctctggttcaagttccttgattgtttttgactgcttttcactgcttttcttctca |
| | | caatccttgctcagttcaaagtc |
| 353 | Caprine | gtggccacgcccgggccaccgatacttcccttcactccttcgggactgttggggaggaacacaac |
| | Kobuvirus | agggctcccctgttttcccattccttcccccttttcccaaccccaaccgccgtatctggtggcggcaa |
| | 5Δ40/3Δ122 | gacacacgggtctttccctctaaagcacaattgtgtgtgtgtcccaggtcctcctgcgtacggtgcg |
| | | ggagtgctcccacccaactgttgtaagcctgtccaacgcgtcgtcctggcaagactatgacgtcgc |
| | | atgttccgctgcggatgccgaccgggtaaccggttccccagtgtgtgtagtgcgatcttccaggtc |
| | | ctcctggttggcgttgtccagaaactgcttcaggtaagtggggtgtgcccaatccctacaaaggttg |
| | | attctttcaccaccttaggaatgctccggaggtaccccagcaacagctgggatctgaccggaggct |
| | | aattgtctacgggtggtgtttcctttttcttttcacacaactaaagtc |
| 354 | Caprine | gtggccacgcccgggccaccgatacttcccttcactccttcgggactgttggggaggaacacaac |
| | Kobuvirus | agggctcccctgttttcccattccttcccccttttcccaaccccaaccgccgtatctggtggggcaa |
| | 5Δ40/3Δ86_Dista1 | gacacacgggtctttccctctaaagcacaattgtgtgtgtgtcccaggtcctcctgcgtacggtgcg |
| | | ggagtgctcccacccaactgttgtaagcctgtccaacgcgtcgtcctggcaagactatgacgtcgc |
| | | atgttccgctgcggatgccgaccgggtaaccggttccccagtgtgtgtagtgcgatcttccaggtc |
| | | ctcctggttggcgttgtccagaaactgcttcaggtaagtggggtgtgcccaatccctacaaaggttg |
| | | attctttcaccaccttaggaatgctccggaggtaccccagcaacagctgggatctgaccggaggct |
| | | aattgtctacgggtggtgtttcctttttcttttcacacaactctactgctgacaactcactgactatccact |
| | | tgctctaaagtc |
| 355 | Caprine | gtggccacgcccgggccaccgatacttcccttcactccttcgggactgttggggaggaacacaac |
| | Kobuvirus | agggctcccctgttttcccattccttcccccttttcccaaccccaaccgccgtatctggtggcggcaa |
| | 5Δ40/3Δ122_ | gacacacgggtctttccctctaaagcacaattgtgtgtgtgtcccaggtcctcctgcgtacggtgcg |
| | Kozak | ggagtgctcccacccaactgttgtaagcctgtccaacgcgtcgtcctggcaagactatgacgtcgc |
| | | atgttccgctgcggatgccgaccgggtaaccggttccccagtgtgtgtagtgcgatcttccaggtc |
| | | ctcctggttggcgttgtccagaaactgcttcaggtaagtggggtgtgcccaatccctacaaaggttg |
| | | attctttcaccaccttaggaatgctccggaggtaccccagcaacagctgggatctgaccggaggct |
| | | aattgtctacgggtggtgtttcctttttcttttcacacaactgccacc |
| 356 | Caprine | gtggccacgcccgggccaccgatacttcccttcactccttcgggactgttggggaggaacacaac |
| | Kobuvirus | agggctcccctgttttcccattccttcccccttttcccaaccccaaccgccgtatctggtggcggcaa |
| | 5Δ40/3Δ86 | gacacacgggtctttccctctaaagcacaattgtgtgtgtgtcccaggtcctcctgcgtacggtgcg |
| | Proximal | ggagtgctcccacccaactgttgtaagcctgtccaacgcgtcgtcctggcaagactatgacgtcgc |
| | | atgttccgctgcggatgccgaccgggtaaccggttccccagtgtgtgtagtgcgatcttccaggtc |
| | | ctcctggttggcgttgtccagaaactgcttcaggtaagtggggtgtgcccaatccctacaaaggttg |
| | | attctttcaccaccttaggaatgctccggaggtaccccagcaacagctgggatctgaccggaggct |
| | | aattgtctacgggtggtgtttcctttttcttttcacacaactttcactgcttttcttctcacaatccttgctca |
| | | gttcaaagtc |
| 357 | Parabovirus | tgaaccgttacgcaccactcagttggtgtttggtggcaccaatgatggaacaaaaggctacaccac |
| | | ttgggctacggcccgcgccaccttgtggcgcaaagacattagaagaatagcataccgcccactag |
| | | ggccctgcagccagcagggtaacgggcaagcacttctgtctccccggtagaacggtataggctgt |
| | | acccacggccgaaaactgaactatcgttacccgactccgtacttcgcaaagcttagtaggaaactg |
| | | gaaagttcgagttattgacccggagtgttccccccactccagaaacgcgtgatgagggttgccacc |
| | | ccgaccatggcgacatggtgggcatccctgcgctggcacgcggcctctaagaggataactcgct |
| | | cctactggtaaccgaagagccccgtgagctacggtttattcctccgcctccctgaatgcggctaatc |
| | | ctaacccatgagcagttgccatagatccatatggtggactgtcgtaacgcgtaagttgtgggcgga |
| | | accgactactttgggatggcgtgtttccttgttttctccatttgttgttgtatggtgacaagttatagatct |
| | | cgatctatagcgtttcttgagagatttccaaacatttattcaagtcgtacaattcttgtgtttaagcagta |
| | | cagtgtaagg |
| 358 | Parabovirus 5Δ48 | aacaaaaggctacaccacttgggctacggcccgcgccaccttgtggcgcaaagacattagaaga |
| | | atagcataccgcccactagggccctgcagccagcagggtaacgggcaagcacttctgtctcccc |
| | | ggtagaacggtataggctgtacccacggccgaaaactgaactatcgttacccgactccgtacttcg |
| | | caaagcttagtaggaaactggaaagttcgagttattgacccggagtgttccccccactccagaaac |
| | | gcgtgatgagggttgccaccccgaccatggcgacatggtgggcatccctgcgctggcacgcgg |
| | | cctctaagaggataactcgctcctactggtaaccgaagagccccgtgagctacggtttattcctccg |
| | | cctccctgaatgcggctaatcctaacccatgagcagttgccatagatccatatggtggactgtcgta |
| | | acgcgtaagttgtgggcggaaccgactactttgggatggcgtgtttccttgttttctccatttgttgttgt |
| | | atggtgacaagttatagatctcgatctatagcgtttcttgagagatttccaaacatttattcaagtcgta |
| | | caattcttgtgtttaagcagtacagtgtaagg |
| 359 | Parabovirus 5Δ67 | tgggctacggcccgcgccaccttgtggcgcaaagacattagaagaatagcataccgcccactag |
| | | ggccctgcagccagcagggtaacgggcaagcacttctgtctccccggtagaacggtataggctgt |
| | | acccacggccgaaaactgaactatcgttacccgactccgtacttcgcaaagcttagtaggaaactg |
| | | gaaagttcgagttattgacccggagtgttccccccactccagaaacgcgtgatgagggttgccacc |
| | | ccgaccatggcgacatggtgggcatccctgcgctggcacgcggcctctaagaggataactcgct |
| | | cctactggtaaccgaagagccccgtgagctacggtttattcctccgcctccctgaatgcggctaatc |
| | | ctaacccatgagcagttgccatagatccatatggtggactgtcgtaacgcgtaagttgtgggcgga |
| | | accgactactttgggatggcgtgtttccttgttttctccatttgttgttgtatggtgacaagttatagatct |
| | | cgatctatagcgtttcttgagagatttccaaacatttattcaagtcgtacaattcttgtgtttaagcagta |
| | | cagtgtaagg |
| 360 | Parabovirus 3Δ60 | tgaaccgttacgcaccactcagttggtgtttggtggcaccaatgatggaacaaaaggctacaccac |
| | | ttgggctacggcccgcgccaccttgtggcgcaaagacattagaagaatagcataccgcccactag |
| | | ggccctgcagccagcagggtaacgggcaagcacttctgtctccccggtagaacggtataggctgt |
| | | acccacggccgaaaactgaactatcgttacccgactccgtacttcgcaaagcttagtaggaaactg |
| | | gaaagttcgagttattgacccggagtgttccccccactccagaaacgcgtgatgagggttgccacc |
| | | ccgaccatggcgacatggtgggcatccctgcgctggcacgcggcctctaagaggataactcgct |
| | | cctactggtaaccgaagagccccgtgagctacggtttattcctccgcctccctgaatgcggctaatc |
| | | ctaacccatgagcagttgccatagatccatatggtggactgtcgtaacgcgtaagttgtgggcgga |
| | | accgactactttgggatggcgtgtttccttgttttctccatttgttgttgtatggtgacaagttatagatct |
| | | cgatctatagcgtttgtaagg |
| 361 | Apodemus | tttgaaaggggtgcggatatcatggcgtttctcgccatgatatccgcacattgcaaacccatattgca |
| | Picornavirus | tacccactgggtatgcattatggggaggcccctttcacccctccccccccaattaccttttccccctct |
| | | agtaaccatacgctttactcagcgtaactactccgggttacgtgatgaagaagaggctacggagatt |
| | | ctcgggctacggccctggagccactccggctcctaaagatttagaagtttgagcacacccgccca |
| | | ctagggccccccatccaggggggcaacgggcaagcacttctgtttccccggtatgatctgatagg |
| | | ctgtaaccacggctgaaacagagattatcgttatccgcttcactacttcgagaagcctagtaatgatg |
| | | ggtgaaattgaatccgttgatccggtgtctcccccacaccagaaactcatgatgagggttgccatcc |
| | | cggctacggcgacgtagcgggcatccctgcgctggcatgaggcctcttaggaggacggatgata |
| | | tggatcttgtcgtgaagagcctattgagctagtgtcgactcctccgcccccgtgaatgcggctaatc |
| | | ctaaccccggagcaggtgggtccaatccagggcctggcctgtcgtaatgcgtaagtctgggacg |
| | | gaaccgactactttcgggaaggcgtgtttccatttgttcattatttgtgtgtttatggtgacaactctgg |
| | | gtaaacgttctattgcgtttattgagagattcccaacaattgaacaaacgagaactacctgttttattaa |
| | | atttacacagagaagaattaca |
| 362 | Apodemus | cccctccccccccaattaccttttccccctctagtaaccatacgctttactcagcgtaactactccggg |
| | Picornavirus | ttacgtgatgaagaagaggctacggagattctcgggctacggccctggagccactccggctccta |
| | 5Δ105 | aagatttagaagtttgagcacacccgcccactagggccccccatccaggggggcaacgggcaa |
| | | gcacttctgtttccccggtatgatctgataggctgtaaccacggctgaaacagagattatcgttatcc |
| | | gcttcactacttcgagaagcctagtaatgatgggtgaaattgaatccgttgatccggtgtctccccca |
| | | caccagaaactcatgatgagggttgccatcccggctacggcgacgtagcgggcatccctgcgct |
| | | ggcatgaggcctcttaggaggacggatgatatggatcttgtcgtgaagagcctattgagctagtgtc |
| | | gactcctccgcccccgtgaatgcggctaatcctaaccccggagcaggtgggtccaatccagggc |
| | | ctggcctgtcgtaatgcgtaagtctgggacggaaccgactactttcgggaaggcgtgtttccatttgt |
| | | tcattatttgtgtgtttatggtgacaactctgggtaaacgttctattgcgtttattgagagattcccaaca |
| | | attgaacaaacgagaactacctgttttattaaatttacacagagaagaattaca |
| 363 | Apodemus | attctcgggctacggccctggagccactccggctcctaaagatttagaagtttgagcacacccgcc |
| | Picornavirus | cactagggccccccatccaggggggcaacgggcaagcacttctgtttccccggtatgatctgata |
| | 5Δ201 | ggctgtaaccacggctgaaacagagattatcgttatccgcttcactacttcgagaagcctagtaatg |
| | | atgggtgaaattgaatccgttgatccggtgtctcccccacaccagaaactcatgatgagggttgcca |
| | | tcccggctacggcgacgtagcgggcatccctgcgctggcatgaggcctcttaggaggacggatg |
| | | atatggatcttgtcgtgaagagcctattgagctagtgtcgactcctccgcccccgtgaatgcggcta |
| | | atcctaaccccggagcaggtgggtccaatccagggcctggcctgtcgtaatgcgtaagtctggga |
| | | cggaaccgactactttcgggaaggcgtgtttccatttgttcattatttgtgtgtttatggtgacaactctg |
| | | ggtaaacgttctattgcgtttattgagagattcccaacaattgaacaaacgagaactacctgttttatta |
| | | aatttacacagagaagaattaca |
| 364 | Kobuvirus | tttcacaccctcttttccggtggtccggacccagaccaccgttactccattcagctacttcggtacctg |
| | SZAL6 | ttcggaggaattaaacgggcaccctacccaagggttacatgggaccatattcctcctcccctgtaac |
| | | tttaagttttgtgcccgtattcttgactccaggcggatgttgtgtcgcccgtcctgtgaacaaacagct |
| | | agacactttcctcccctccctctgggctgctccggcagtccactccctccccccagcgtaacatgcc |
| | | ccgctggagtgatgcacctggaagtcgtggacgtgggttagtaacttcggtgaaaacccactataa |
| | | tgacaactggttgacccccacactcaaaggactcgagtctttctcccttaaggctagcccggccac |
| | | atgaatttgcagctggcaactagtgagtccaccatgtcccgcaacctcggctgcggagtgctgttc |
| | | cccaagcgtatgccttccttctgtaagagtgcgcctggcaagcacatctgagaagtcgttccgctgc |
| | | gtcgtgccaacctggcgacaggtgacccagtgtgcgtagacttcttccggattcgtccggctcttct |
| | | ctaggaaacatgcgtgtaaggttcatgtgccaaagccctgcgcgcggtgttcttctactgccctagg |
| | | aatgtgccgcaggtacccctacttcggtagggatctgagcggtagctaattgtctacgggtagtttc |
| | | atttccatcttctcttcaggtcgacatc |
| 365 | Kobuvirus | ttgactccaggcggatgttgtgtcgcccgtcctgtgaacaaacagctagacactttcctcccctccct |
| | SZAL6 5Δ158 | ctgggctgctccggcagtccactccctccccccagcgtaacatgccccgctggagtgatgcacct |
| | | ggaagtcgtggacgtgggttagtaacttcggtgaaaacccactataatgacaactggttgaccccc |
| | | acactcaaaggactcgagtctttctcccttaaggctagcccggccacatgaatttgcagctggcaac |
| | | tagtgagtccaccatgtcccgcaacctcggctgcggagtgctgttccccaagcgtatgccttccttc |
| | | tgtaagagtgcgcctggcaagcacatctgagaagtcgttccgctgcgtcgtgccaacctggcgac |
| | | aggtgacccagtgtgcgtagacttcttccggattcgtccggctcttctctaggaaacatgcgtgtaa |
| | | ggttcatgtgccaaagccctgcgcgcggtgttcttctactgccctaggaatgtgccgcaggtaccc |
| | | ctacttcggtagggatctgagcggtagctaattgtctacgggtagtttcatttccatcttctcttcaggt |
| | | cgacatc |
| 366 | Kobuvirus | gaattaaacgggcaccctacccaagggttacatgggaccatattcctcctcccctgtaactttaagtt |
| | SZAL6 5Δ76 | ttgtgcccgtattcttgactccaggcggatgttgtgtcgcccgtcctgtgaacaaacagctagacact |
| | | ttcctcccctccctctgggctgctccggcagtccactccctccccccagcgtaacatgccccgctg |
| | | gagtgatgcacctggaagtcgtggacgtgggttagtaacttcggtgaaaacccactataatgacaa |
| | | ctggttgacccccacactcaaaggactcgagtctttctcccttaaggctagcccggccacatgaatt |
| | | tgcagctggcaactagtgagtccaccatgtcccgcaacctcggctgcggagtgctgttccccaag |
| | | cgtatgccttccttctgtaagagtgcgcctggcaagcacatctgagaagtcgttccgctgcgtcgtg |
| | | ccaacctggcgacaggtgacccagtgtgcgtagacttcttccggattcgtccggctcttctctagga |
| | | aacatgcgtgtaaggttcatgtgccaaagccctgcgcgcggtgttcttctactgccctaggaatgtg |
| | | ccgcaggtacccctacttcggtagggatctgagcggtagctaattgtctacgggtagtttcatttcca |
| | | tcttctcttcaggtcgacatc |
| 367 | Kobuvirus | tttcacaccctcttttccggtggtccggacccagaccaccgttactccattcagctacttcggtacctg |
| | SZAL6 3Δ37 | ttcggaggaattaaacgggcaccctacccaagggttacatgggaccatattcctcctcccctgtaac |
| | | tttaagttttgtgcccgtattcttgactccaggcggatgttgtgtcgcccgtcctgtgaacaaacagct |
| | | agacactttcctcccctccctctgggctgctccggcagtccactccctccccccagcgtaacatgcc |
| | | ccgctggagtgatgcacctggaagtcgtggacgtgggttagtaacttcggtgaaaacccactataa |
| | | tgacaactggttgacccccacactcaaaggactcgagtctttctcccttaaggctagcccggccac |
| | | atgaatttgcagctggcaactagtgagtccaccatgtcccgcaacctcggctgcggagtgctgttc |
| | | cccaagcgtatgccttccttctgtaagagtgcgcctggcaagcacatctgagaagtcgttccgctgc |
| | | gtcgtgccaacctggcgacaggtgacccagtgtgcgtagacttcttccggattcgtccggctcttct |
| | | ctaggaaacatgcgtgtaaggttcatgtgccaaagccctgcgcgcggtgttcttctactgccctagg |
| | | aatgtgccgcaggtacccctacttcggtagggatctgagcggtagctaattggacatc |
| 368 | Salivirus SZ1 | tctgtcctcaccccatcttcccttctttcctgcaccgttacgcttactcgcatgtgcattgagtggtgca |
| | | cgtgcttgaacaaacagctacactcacatggggggggttttcccgccctgcggcctctcgcgag |
| | | gcccacccctccccttcctcccataactacagtgctttggtaggtaagcatcctgatcccccgcgga |
| | | agctgctcacgtggcaactgtggggacccagacaggttatcaaaggcacccggtctttccgccttc |
| | | aggagtatccctgctagtgaattctagtagggctctgcttggtgccaacctcccccaaatgcgcgct |
| | | gcgggagtgctcttccccaactcaccctagtatcctctcatgtgtgtgcttggtcagcatatctgaga |
| | | cgatgttccgctgtcccagaccagtccagtaatggacgggccagtgtgcgtagtcgtcttccggctt |
| | | gtccggcgcatgtttggtgaaccggtggggtaaggttggtgtgcccaacgcccgtactttggtgat |
| | | acctcaagaccacccaggaatgccagggaggtaccccgcttcacagcgggatctgaccctggg |
| | | ctaattgtctacggtggttcttcttgcttccacttctttctactgttcatg |
| 369 | Crohivirus B | gtataagagacaggtgtttgccttgtcttcggactggcatcttgggaccaaccccccttttccccagc |
| | | catgggttaaatggcaataaaggacgtaacaactttgtaaccattaagctttgtaattttgtaaccact |
| | | aagctttgtgcacataatgtaaccatcaagcttgttagtcccagcaggaggtttgcatgcttgtagcc |
| | | gaaatggggctcgaccccccatagtaggatacttgattttgcattccattgtggacctgcaaactcta |
| | | cacatagaggctttgtcttgcatctaaacacctgagtacagtgtgtacctagaccctatagtacggga |
| | | ggaccgtttgtttcctcaataaccctacataataggctaggtgggcatgcccaatttgcaagatccca |
| | | gactgggggtcggtctgggcagggttagatccctgttagctactgcctgatagggtggtgctcaac |
| | | catgtgtagtttaaattgagctgttcatatacc |
| 370 | Crohivirus B | ccccccttttccccagccatgggttaaatggcaataaaggacgtaacaactttgtaaccattaagctt |
| | 5Δ51 | tgtaattttgtaaccactaagctttgtgcacataatgtaaccatcaagcttgttagtcccagcaggagg |
| | | tttgcatgcttgtagccgaaatggggctcgaccccccatagtaggatacttgattttgcattccattgt |
| | | ggacctgcaaactctacacatagaggctttgtcttgcatctaaacacctgagtacagtgtgtacctag |
| | | accctatagtacgggaggaccgtttgtttcctcaataaccctacataataggctaggtgggcatgcc |
| | | caatttgcaagatcccagactgggggtcggtctgggcagggttagatccctgttagctactgcctg |
| | | atagggtggtgctcaaccatgtgtagtttaaattgagctgttcatatacc |
| 371 | CVB3 | ttaaaacagcctgtgggttgatcccacccacagggcccattgggcgctagcactctggtatcacgg |
| | | tacctttgtgcgcctgttttataccccctcccccaactgtaacttagaagtaacacacaccgatcaac |
| | | agtcagcgtggcacaccagccacgttttgatcaagcacttctgttaccccggactgagtatcaatag |
| | | actgctcacgcggttgaaggagaaagcgttcgttatccggccaactacttcgaaaaacctagtaac |
| | | accgtggaagttgcagagtgtttcgctcagcactaccccagtgtagatcaggtcgatgagtcaccg |
| | | cattccccacgggcgaccgtggcggtggctgcgttggcggcctgcccatggggaaacccatgg |
| | | gacgctctaatacagacatggtgcgaagagtctattgagctagttggtagtcctccggcccctgaat |
| | | gcggctaatcctaactgcggagcacacaccctcaagccagagggcagtgtgtcgtaacgggcaa |
| | | ctctgcagcggaaccgactactttgggtgtccgtgtttcattttattcctatactggctgcttatggtga |
| | | caattgagagattgttaccatatagctattggattggccatccggtgaccaatagagctattatatatct |
| | | ctttgttgggtttataccacttagcttgaaagaggttaaaacattacaattcattgttaagttgaatacag |
| | | caaa |
| 372 | CVB3 3Δ91 | ttaaaacagcctgtgggttgatcccacccacagggcccattgggcgctagcactctggtatcacgg |
| | | tacctttgtgcgcctgttttataccccctcccccaactgtaacttagaagtaacacacaccgatcaac |
| | | agtcagcgtggcacaccagccacgttttgatcaagcacttctgttaccccggactgagtatcaatag |
| | | actgctcacgcggttgaaggagaaagcgttcgttatccggccaactacttcgaaaaacctagtaac |
| | | accgtggaagttgcagagtgtttcgctcagcactaccccagtgtagatcaggtcgatgagtcaccg |
| | | cattccccacgggcgaccgtggcggtggctgcgttggcggcctgcccatggggaaacccatgg |
| | | gacgctctaatacagacatggtgcgaagagtctattgagctagttggtagtcctccggcccctgaat |
| | | gcggctaatcctaactgcggagcacacaccctcaagccagagggcagtgtgtcgtaacgggcaa |
| | | ctctgcagcggaaccgactactttgggtgtccgtgtttcattttattcctatactggctgcttatggtga |
| | | caattgagagattgttaccatatagctattggattggccatccggtgaagcaaa |
| 373 | SAFV | cacttatttaattcggccttttgtgacaagcccctcggtgaaagaacctctctcttttcgacgtggttgg |
| | | aattgccatcatttccgacgaaagtgctatcatgcctccccgattatgtgatgttttctgccctgctgg |
| | | gcggagcattctcgggttgagaaaccttgaatctttttctttggaaccttggttcccccggtctaagcc |
| | | gcttggaatatgacagggttattttcttgatcttatttctacttttgcgggttctatccgtaaaaagggtac |
| | | gtgctgccccttccttctctggagaattcacacggcggtctttccgtctctcaacaagtgtgaatgca |
| | | gcatgccggaaacggtgaagaaaacagttttctgtggaaatttagagtgcacatcgaaacagctgt |
| | | agcgacctcacagtagcagcggactcccctcttggcgacaagagcctctgcggccaaaagcccc |
| | | gtggataagatccactgctgtgagcggtgcaaccccagcaccctggttcgatgatcattctctatgg |
| | | aaccagaaaatggttttctcaagccctccggtagagaagccaagaatgtcctgaaggtaccccgc |
| | | gtgcgggatctgatcaggagaccaattggcggtgctttacactgtcactttggtttaaaaattgtcac |
| | | agcttctccaaaccaagtggtcttggttttccaattttgttga |
| 374 | SAFV 5Δ46 | cctctctcttttcgacgtggttggaattgccatcatttccgacgaaagtgctatcatgcctccccgatta |
| | | tgtgatgttttctgccctgctgggcggagcattctcgggttgagaaaccttgaatctttttctttggaac |
| | | cttggttcccccggtctaagccgcttggaatatgacagggttattttcttgatcttatttctacttttgcgg |
| | | gttctatccgtaaaaagggtacgtgctgccccttccttctctggagaattcacacggcggtctttccgt |
| | | ctctcaacaagtgtgaatgcagcatgccggaaacggtgaagaaaacagttttctgtggaaatttaga |
| | | gtgcacatcgaaacagctgtagcgacctcacagtagcagcggactcccctcttggcgacaagag |
| | | cctctgcggccaaaagccccgtggataagatccactgctgtgagcggtgcaaccccagcaccct |
| | | ggttcgatgatcattctctatggaaccagaaaatggttttctcaagccctccggtagagaagccaag |
| | | aatgtcctgaaggtaccccgcgtgcgggatctgatcaggagaccaattggcggtgctttacactgt |
| | | cactttggtttaaaaattgtcacagcttctccaaaccaagtggtcttggttttccaattttgttga |
| 375 | SAFV 5Δ93 | gtgctatcatgcctccccgattatgtgatgttttctgccctgctgggcggagcattctcgggttgaga |
| | | aaccttgaatctttttctttggaaccttggttcccccggtctaagccgcttggaatatgacagggttattt |
| | | tcttgatcttatttctacttttgcgggttctatccgtaaaaagggtacgtgctgccccttccttctctgga |
| | | gaattcacacggcggtctttccgtctctcaacaagtgtgaatgcagcatgccggaaacggtgaaga |
| | | aaacagttttctgtggaaatttagagtgcacatcgaaacagctgtagcgacctcacagtagcagcg |
| | | gactcccctcttggcgacaagagcctctgcggccaaaagccccgtggataagatccactgctgtg |
| | | agcggtgcaaccccagcaccctggttcgatgatcattctctatggaaccagaaaatggttttctcaa |
| | | gccctccggtagagaagccaagaatgtcctgaaggtaccccgcgtgcgggatctgatcaggaga |
| | | ccaattggcggtgctttacactgtcactttggtttaaaaattgtcacagcttctccaaaccaagtggtct |
| | | tggttttccaattttgttga |
| 376 | SAFV 3Δ47 | cacttatttaattcggccttttgtgacaagcccctcggtgaaagaacctctctcttttcgacgtggttgg |
| | | aattgccatcatttccgacgaaagtgctatcatgcctccccgattatgtgatgttttctgccctgctgg |
| | | gcggagcattctcgggttgagaaaccttgaatctttttctttggaaccttggttcccccggtctaagcc |
| | | gcttggaatatgacagggttattttcttgatcttatttctacttttgcgggttctatccgtaaaaagggtac |
| | | gtgctgccccttccttctctggagaattcacacggcggtctttccgtctctcaacaagtgtgaatgca |
| | | gcatgccggaaacggtgaagaaaacagttttctgtggaaatttagagtgcacatcgaaacagctgt |
| | | agcgacctcacagtagcagcggactcccctcttggcgacaagagcctctgcggccaaaagcccc |
| | | gtggataagatccactgctgtgagcggtgcaaccccagcaccctggttcgatgatcattctctatgg |
| | | aaccagaaaatggttttctcaagccctccggtagagaagccaagaatgtcctgaaggtaccccgc |
| | | gtgcgggatctgatcaggagaccaattggcggtgctttacactgtcactttggtttaatgttga |
| 377 | SAFV Kozak | cacttatttaattcggccttttgtgacaagcccctcggtgaaagaacctctctcttttcgacgtggttgg |
| | | aattgccatcatttccgacgaaagtgctatcatgcctccccgattatgtgatgttttctgccctgctgg |
| | | gcggagcattctcgggttgagaaaccttgaatctttttctttggaaccttggttcccccggtctaagcc |
| | | gcttggaatatgacagggttattttcttgatcttatttctacttttgcgggttctatccgtaaaaagggtac |
| | | gtgctgccccttccttctctggagaattcacacggcggtctttccgtctctcaacaagtgtgaatgca |
| | | gcatgccggaaacggtgaagaaaacagttttctgtggaaatttagagtgcacatcgaaacagctgt |
| | | agcgacctcacagtagcagcggactcccctcttggcgacaagagcctctgcggccaaaagcccc |
| | | gtggataagatccactgctgtgagcggtgcaaccccagcaccctggttcgatgatcattctctatgg |
| | | aaccagaaaatggttttctcaagccctccggtagagaagccaagaatgtcctgaaggtaccccgc |
| | | gtgcgggatctgatcaggagaccaattggcggtgctttacactgtcactttggtttaaaaattgtcac |
| | | agcttctccaaaccaagtggtcttggttttccaattttgttgaccgcc |
| 378 | GLuc CK dCTG1 | gtggccacgcccgggccaccgatacttcccttcactccttcgggactgttggggaggaacacaac |
| | | agggctcccctgttttcccattccttcccccttttcccaaccccaaccgccgtatctggtggcggcaa |
| | | gacacacgggtctttccctctaaagcacaattgtgtgtgtgtcccaggtcctcctgcgtacggtgcg |
| | | ggagtgctcccacccaactgttgtaagcctgtccaacgcgtcgtcctggcaagactatgacgtcgc |
| | | atgttccgctgcggatgccgaccgggtaaccggttccccagtgtgtgtagtgcgatcttccaggtc |
| | | ctcctggttggcgttgtccagaaactgcttcaggtaagtggggtgtgcccaatccctacaaaggttg |
| | | attctttcaccaccttaggaatgctccggaggtaccccagcaacagctgggatctgaccggaggct |
| | | aattgtctacgggtggtgtttcctttttcttttcacacaactctacGTctgacaactcactgactatcca |
| | | cttgctctaaagtc |
| 379 | GLuc CK | gtggccacgcccgggccaccgatacttcccttcactccttcgggactgttggggaggaacacaac |
| | dCTG1_2 | agggctcccctgttttcccattccttcccccttttcccaaccccaaccgccgtatctggtggcggcaa |
| | | gacacacgggtctttccctctaaagcacaattgtgtgtgtgtcccaggtcctcctgcgtacggtgcg |
| | | ggagtgctcccacccaactgttgtaagcctgtccaacgcgtcgtcctggcaagactatgacgtcgc |
| | | atgttccgctgcggatgccgaccgggtaaccggttccccagtgtgtgtagtgcgatcttccaggtc |
| | | ctcctggttggcgttgtccagaaactgcttcaggtaagtggggtgtgcccaatccctacaaaggttg |
| | | attctttcaccaccttaggaatgctccggaggtaccccagcaacagctgggatctgaccggaggct |
| | | aattgtctacgggtggtgtttcctttttttttcacacaactctacGTcGTacaactcactgactatcc |
| | | acttgctctaaagtc |
| 380 | GLuc CK | gtggccacgcccgggccaccgatacttcccttcactccttcgggactgttggggaggaacacaac |
| | dCTG1_2_3 | agggctcccctgttttcccattccttcccccttttcccaaccccaaccgccgtatctggtggcggcaa |
| | | gacacacgggtctttccctctaaagcacaattgtgtgtgtgtcccaggtcctcctgcgtacggtgcg |
| | | ggagtgctcccacccaactgttgtaagcctgtccaacgcgtcgtcctggcaagactatgacgtcgc |
| | | atgttccgctgcggatgccgaccgggtaaccggttccccagtgtgtgtagtgcgatcttccaggtc |
| | | ctcctggttggcgttgtccagaaactgcttcaggtaagtggggtgtgcccaatccctacaaaggttg |
| | | attctttcaccaccttaggaatgctccggaggtaccccagcaacagctgggatctgaccggaggct |
| | | aattgtctacgggtggtgtttcctttttttttcacacaactctacGTcGTacaactcacGTactat |
| | | ccacttgctctaaagtc |
| 381 | GLuc CK dAll | gtggccacgcccgggccaccgatacttcccttcactccttcgggactgttggggaggaacacaac |
| | | agggctcccctgttttcccattccttcccccttttcccaaccccaaccgccgtatctggtggcggcaa |
| | | gacacacgggtctttccctctaaagcacaattgtgtgtgtgtcccaggtcctcctgcgtacggtgcg |
| | | ggagtgctcccacccaactgttgtaagcctgtccaacgcgtcgtcctggcaagactatgacgtcgc |
| | | atgttccgctgcggatgccgaccgggtaaccggttccccagtgtgtgtagtgcgatcttccaggtc |
| | | ctcctggttggcgttgtccagaaactgcttcaggtaagtggggtgtgcccaatccctacaaaggttg |
| | | attctttcaccaccttaggaatgctccggaggtaccccagcaacagctgggatctgaccggaggct |
| | | aattgtctacgggtggtgtttcctttttcttttcacacaactctacGTcGTacaactcacGTactaC |
| | | TcactGTctctaaagtc |
| 382 | CK SZ1-L1S | gggggggggggggcctcggccccctcaccctcttttccggtggccacgcccgggccaccgat |
| | | acttcccttcactccttcgggactgttggggaggaacacaacagggctcccctgttttcccattcctt |
| | | cccccttttcccaaccccaaccgccgtatctggtggcggcaagacacacgggtctttccctctaaa |
| | | gcacaattgtgtgtgtgtcccaggtcctcctgcgtacggtgcgggagtgctcccacccaactgttgt |
| | | aagcctgtccaacgcgtcgtcctggcaagactatgacgtcgcatgttccgctgcggatgccgacc |
| | | gggtaaccggttccccagtgtgtgtagtgcgatcttccaggtcctcctggttggcgttgtccagaaa |
| | | ctgcttcaggtaagtggggtgtgcccaatccctacaaaggttgaaccacccaggaatgccaggga |
| | | ggtaccccgcttcacagcgggatctgaccctgggctaattgtctacggtggttcttcttgcttccactt |
| | | ctttctactgttcgccacc |
| 383 | CK Aichi Scan | gggggggggggggcctcggccccctcaccctcttttccggtggccacgcccgggccaccgat |
| | (AV-S) | acttcccttcactccttcgggactgttggggaggaacacaacagggctcccctgttttcccattcctt |
| | | cccccttttcccaaccccaaccgccgtatctggtggcggcaagacacacgggtctttccctctaaa |
| | | gcacaattgtgtgtgtgtcccaggtcctcctgcgtacggtgcgggagtgctcccacccaactgttgt |
| | | aagcctgtccaacgcgtcgtcctggcaagactatgacgtcgcatgttccgctgcggatgccgacc |
| | | gggtaaccggttccccagtgtgtgtagtgcgatcttccaggtcctcctggttggcgttgtccagaaa |
| | | ctgcttcaggtaagtggggtgtgcccaatccctacaaaggttgattctttcaccaccttaggaatgct |
| | | ccggaggtaccccagcaacagctgggatctgaccggaggctaattgtctacgggtggtgtttcatt |
| | | tccaatccttttatgtcggagtc |
| 384 | CK Aichi Loop | gggggggggggggcctcggccccctcaccctcttttccggtggccacgcccgggccaccgat |
| | (AV-L1) | acttcccttcactccttcgggactgttggggaggaacacaacagggctcccctgttttcccattcctt |
| | | cccccttttcccaaccccaaccgccgtatctggtggcggcaagacacacgggtctttccctctaaa |
| | | gcacaattgtgtgtgtgtcccaggtcctcctgcgtacggtgcgggagtgctcccacccaactgttgt |
| | | aagcctgtccaacgcgtcgtcctggcaagactatgacgtcgcatgttccgctgcggatgccgacc |
| | | gggtaaccggttccccagtgtgtgtagtgcgatcttccaggtcctcctggttggcgttgtccagaaa |
| | | ctgcttcaggtaagtggggtgtgcccaatccctacaaaggttgaactgccctaggaatgccaggca |
| | | ggtaccccacctccgggtgggatctgagcctgggctaattgtctacgggtagttttcctttttcttttca |
| | | cacaactctactgctgacaactcactgactatccacttgctctcttgtgcctttctgctctggttcaagtt |
| | | ccttgattgtttttgactgcttttcactgcttttcttctcacaatccttgctcagttcaaagtc |
| 385 | CK SZ1-L2 | gggggggggggggcctcggccccctcaccctcttttccggtggccacgcccgggccaccgat |
| | | acttcccttcactccttcgggactgttggggaggaacacaacagggctcccctgttttcccattcctt |
| | | cccccttttcccaaccccaaccgccgtatctggtggcggcaagacacacgggtctttccctctaaa |
| | | gcacaattgtgtgtgtgtcccaggtcctcctgcgtacggtgcgggagtgctcccacccaactgttgt |
| | | aagcctgtccaacgcctgatcccccgcggaagctgctcacgtggcaactgtggggacccagaca |
| | | ggttatcaaaggcacccggtctttccgccttcaggagtatccctgctagtgaattctagtagggctct |
| | | gcttgcgttgtccagaaactgcttcaggtaagtggggtgtgcccaatccctacaaaggttgattcttt |
| | | caccaccttaggaatgctccggaggtaccccagcaacagctgggatctgaccggaggctaattgt |
| | | ctacgggtggtgtttcctttttcttttcacacaactctactgctgacaactcactgactatccacttgctct |
| | | cttgtgcctttctgctctggttcaagttccttgattgtttttgactgcttttcactgcttttcttctcacaatcc |
| | | ttgctcagttcaaagtc |
| 386 | CK Aichi | gggggggggggggcctcggccccctcaccctcttttccggtggccacgcccgggccaccgat |
| | TriLoop (AV-L2) | acttcccttcactccttcgggactgttggggaggaacacaacagggctcccctgttttcccattcctt |
| | | cccccttttcccaaccccaaccgccgtatctggtggcggcaagacacacgggtctttccctctaaa |
| | | gcacaattgtgtgtgtgtcccaggtcctcctgcgtacggtgcgggagtgctcccacccaactgttgt |
| | | aagcctgtccaacgcatgtgcctggcaagcatatctgagaaggtgttccgctgtggctgccaacct |
| | | ggtgacaggtgccccagtgtgcgtaaccttcttccgtctccggacggtgcgttgtccagaaactgct |
| | | tcaggtaagtggggtgtgcccaatccctacaaaggttgattctttcaccaccttaggaatgctccgg |
| | | aggtaccccagcaacagctgggatctgaccggaggctaattgtctacgggtggtgtttcctttttcttt |
| | | tcacacaactctactgctgacaactcactgactatccacttgctctcttgtgcctttctgctctggttcaa |
| | | gttccttgattgtttttgactgcttttcactgcttttcttctcacaatccttgctcagttcaaagtc |
| 387 | CK Scan | gggggggggggggcctcggccccctcaccctcttttccggtggccacgcccgggccaccgat |
| | Deletion (ΔS) | acttcccttcactccttcgggactgttggggaggaacacaacagggctcccctgttttcccattcctt |
| | | cccccttttcccaaccccaaccgccgtatctggtggcggcaagacacacgggtctttccctctaaa |
| | | gcacaattgtgtgtgtgtcccaggtcctcctgcgtacggtgcgggagtgctcccacccaactgttgt |
| | | aagcctgtccaacgcgtcgtcctggcaagactatgacgtcgcatgttccgctgcggatgccgacc |
| | | gggtaaccggttccccagtgtgtgtagtgcgatcttccaggtcctcctggttggcgttgtccagaaa |
| | | ctgcttcaggtaagtggggtgtgcccaatccctacaaaggttgattctttcaccaccttaggaatgct |
| | | ccggaggtaccccagcaacagctgggatctgaccggaggctaattgtctacgggtggtg |
| 388 | CK Loop | gggggggggggggcctcggccccctcaccctcttttccggtggccacgcccgggccaccgat |
| | Deletion (ΔL1) | acttcccttcactccttcgggactgttggggaggaacacaacagggctcccctgttttcccattcctt |
| | | cccccttttcccaaccccaaccgccgtatctggtggcggcaagacacacgggtctttccctctaaa |
| | | gcacaattgtgtgtgtgtcccaggtcctcctgcgtacggtgcgggagtgctcccacccaactgttgt |
| | | aagcctgtccaacgcgtcgtcctggcaagactatgacgtcgcatgttccgctgcggatgccgacc |
| | | gggtaaccggttccccagtgtgtgtagtgcgatcttccaggtcctcctggttggcgttgtccagaaa |
| | | ctgcttcaggtaagtggggtgtgcccaatccctacaaaggttgatttcctttttcttttcacacaactct |
| | | actgctgacaactcactgactatccacttgctctcttgtgcctttctgctctggttcaagttccttgattgt |
| | | ttttgactgcttttcactgcttttcttctcacaatccttgctcagttcaaagtc |
| 389 | CK Triloop | gggggggggggggcctcggccccctcaccctcttttccggtggccacgcccgggccaccgat |
| | Deletion (ΔL2) | acttcccttcactccttcgggactgttggggaggaacacaacagggctcccctgttttcccattcctt |
| | | cccccttttcccaaccccaaccgccgtatctggtggggcaagacacacgggtctttccctctaaa |
| | | gcacaattgtgtgtgtgtcccaggtcctcctgcgtacggtgcgggagtgctcccacccaactgttgt |
| | | aagcctgtccaacgcgcgttgtccagaaactgcttcaggtaagtggggtgtgcccaatccctacaa |
| | | aggttgattctttcaccaccttaggaatgctccggaggtaccccagcaacagctgggatctgaccg |
| | | gaggctaattgtctacgggtggtgtttcctttttcttttcacacaactctactgctgacaactcactgact |
| | | atccacttgctctcttgtgcctttctgctctggttcaagttccttgattgtttttgactgcttttcactgctttt |
| | | cttctcacaatccttgctcagttcaaagtc |
| 413 | RhPV | gataaaagaacctataatcccttcgcacaccgcgtcacaccgcgctatatgctgctcattaggaatt |
| | | acggctccttttttgtggatacaatctcttgtatacgatatacttattgttaatttcattgacctttacgcaa |
| | | tcctgcgtaaatgctggtatagggtgtacttcggatttccgagcctatattggttttgaaaggaccttta |
| | | agtccctactatactacattgtactagcgtaggccacgtaggcccgtaagatattataactattttatta |
| | | tattttattcaccccccacattaatcccagttaaagctttataactataagtaagccgtgccgaaacgtt |
| | | aatcggtcgctagttgcgtaacaactgttagtttaattttccaaaatttatttttcacaatttttagttaaga |
| | | ttttagcttgccttaagcagtctttatatcttctgtatattattttaaagtttataggagcaaagttcgcttta |
| | | ctcgcaatagctattttatttattttaggaatattatcacctcgtaattatttaattataacattagctttatct |
| | | atttata |
| 414 | Halastavi arva | cttgattctaaccttgccgtatggtgccctaacgggttcatttaatcatgcgatgagggttgctatacc |
| | (1x mut) | gcatccattctaaggcgattcaatgcttcatttaggaattttgttgacgattaaaaggtacccccacaa |
| | | aaacaaaaccaatcttacttgattttcgttttaactgaccactgcgatcccaaattttcgccttcttatca |
| | | aagtatgttgtgttctttgggtgtacaacctgagaacttgtctacaactacatattactcgaggaagaa |
| | | attcggtttaagccgtgccttctcacgtttagtatatctatctGgacacaccttcttcatcttctaatccc |
| | | catctagtctcctgatcagagacgtcgttattaacaaataaccccccttgttaataagagacaaagta |
| | | caatcaagctaagttctcttggagttcctgtaggaacttagccattgtgatagagtcataagtctatgt |
| | | gcatagacagctctagctcaccatttccttcccaacccatcttttcatcagcttaactctatgaatccga |
| | | tgcaaaaaccattctaacatcttatggtgctttccaagccaaatgagagctcactcttttgagccgcta |
| | | tttaatggacaataaacgttttatagtgtacatcatattgtaaaaacaaa |
| 415 | Oscivirus | cctcggtccctctttccgtcgccgcccacgacgttaaatgcggtgttgtggtgcttaggtgccacac |
| | | cactgctatttgggtccccctttcccctatatatgtttgtttgtttatttcaatttcttgaggattggcacctc |
| | | cttatgccaaatctaaatcgtggaggatcccaggctttctggtctttaacagaactccacgtccaggt |
| | | catagaaactggttggtaggctgcctgagtagtccatttgctagtagtcccttgtgaacagggtggct |
| | | cccgtttactgctggtattcccggtgtaggtcgccatggtggtaacaccatcctgcattgtgtgtgaa |
| | | ccagtaccgcaaggatagcaaggtatgaacacttgtggacgaaatggtaagtgatcaattcactttc |
| | | atggccggaaggtcacgtggcaatcatgccacccaggtaccctcctctgggaggatctgagggt |
| | | gggctaagcagaccctgccatgtggctgaacttttcccttattgttttactttgtaacatttatagttgtgt |
| | | tagtgatttgtgtgttgtgcccttgtgagctatatccagtataagttcgcagctagaagttaatccttcg |
| | | acatcggctgtattggaa |
| 416 | Cadicivirus B | caccaacccttgacctgtaatgtcagtggacagagtgctcctctgttcccggttaccgtgttccagg |
| | | acacgattgtaatcctgcgcctcaccagcgctgcgtgcacgtctgcataaggaaacgtgccttccc |
| | | catgtctctatcaattctttggtgagtgaccgccctagttgctcatcctatgggattcttctctcatgggt |
| | | tctttgtggcatgcgaatgtcaccttaattggaggtctttaattagatatcctttcttcatctttgatatgag |
| | | tgtcggaatttgattcctagtctctgcaaaacaaccccacttgatgaattcaacttttcaaccgcacaa |
| | | acataatcaggtttttaaattgaatgtttctaaattctaaatttagtttatttaagtagtttgccatcttgact |
| | | cgatgtaaaattgtcatacaagtcttcttttcttttctttacactttgaagtttgcacttagcagtcgttctg |
| | | cacagctttcgagttttgtttgatcgacatcgcaacttccacccacctctctttttctagtgttgaatgcg |
| | | gctaatcctaacccgagagcaataaacccaggtttattgtcgtaacgcgcaagtcttggacggaac |
| | | cgactatacacacacctctttaccctttagtacacccttggtacg |
| 417 | PSIV (2x mut for | gcaaaatgggtacgtagttaaccactgcgtatcaggattgcaggccacgaagggtatttgcatatct |
| | Xba1) | ttctatgcggtattacggcttaaaacccgttgtatcttgtTgtttgactgcctgtatcactagtggccatt |
| | | ttatttaggttagagacccctgatagtaggagagttacaaactctttaaaaattgttgaccccggaaa |
| | | agatggtgacccctgtaagtagttgatcAagaagatctatgcgctggcatagtaatccagtgtttcc |
| | | tgttttaggatgacctctgaaagtagatgaccgtggaaagtcacgtagtgccccaataagcacgttt |
| | | gggcagcgtgcgctatcacaaggcttgatctccgaggagccccttgttttagctggctggaagcca |
| | | atgatcttaagtagataagtgctgttgcttgtagttcaacagaaagctttgagtacgtctttcttgcgag |
| | | aaagaacacatgcattcttatgctctcaattctattatttttattttgggcgaaaggaaagctctcacgc |
| | | gagtacgaatagccaaccctttat |
| 418 | PSIV IGR | GCTGACTATGTGATCTTATTAAAATTAGGTTAAATTTCGAG |
| | | GTTAAAAATAGTTTTAATATTGCTATAGTCTTAGAGGTCTT |
| | | GTATATTTATACTTACCACACAAGATGGACCGGAGCAGCCC |
| | | TCCAATATCTAGTGTACCCTCG |
| 419 | PV Mahoney | ATGAGTCTGGACATCCCTCACCGGTGACGGTGGTCCAGGCT |
| | | GCGTTGGCGGCCTACCTATGGCTAACGCCATGGGACGCTAG |
| | | TTGTGAACAAGGTGTGAAGAGCCTATTGAGCTACATAAGA |
| | | ATCCTCCGGCCCCTGAATGCGGCTAATCCCAACCTCGGAGC |
| | | AGGTGGTCACAAACCAGTGATTGGCCTGTCGTAACGCGCA |
| | | AGTCCGTGGCGGAACCGACTACTTTGGGTGTCCGTGTTTCC |
| | | TTTTATTTTATTGTGGCTGCTTATGGTGACAATCACAGATTG |
| | | TTATCATAAAGCGAATTGGATTGGCC |
| 420 | REV A | GGGGTCGCCGTCCTACACATTGTTGTGACGTGCGGCCCAGA |
| | | TTCGAATCTGTAATAAAAGCTTTTTCTTCTATATCCTCAGAT |
| | | TGGCAGTGAGAGGAGATTTTGTTCGTGGTGTTGGCTGGCCT |
| | | ACTGGGTGGGGTAGGGATCCGGACTGAATCCGTAGTATTTC |
| | | GGTACAACATTTGGGGGCTCGTCCGGGATTCCTCCCCATCG |
| | | GCAGAGGTGCCTACTGTTTCTTCGAACTCCGGCGCCGGTAA |
| | | GTAAGTACTTGATTTTGGTACCTCGCGAGGGTTTGGGAGGA |
| | | TCGGAGTGGCGGGACGCTGCCGGGAAGCTCCACCTCCGCT |
| | | CAGCAGGGGACGCCCTGGTCTGAGCTCTGTGGTATCTGATT |
| | | GTTGTTGAACCGTCTCTAAGACGGTGATACTATAAGTCGTG |
| | | GTTTGTGTGTTTGTTTGTTACCTTGTGTTTGTTCGTCACTTGT |
| | | CGACAGCGCCCTGCGAATTGGTGTACCCACACCGCGCGGCT |
| | | TGCGAATAATACTTTGGAGAGTCTTTTGCCTCCAGTGTCTTC |
| | | CGTTTGTACTCGTCCTCCTCTCCCTCTCCGGCCGGGATGGG |
| 421 | Tropivirus A | tgtcgcatgttgccaacatcaaaattctgggagagtcgcgaactccttaacactgccttgcctcgac |
| | | ggagccgttgttatagtgtcgacgggatacaaacattaaactaaacccacttgcctcgacggaacc |
| | | ccttaccttttattttattttatagtatgaaagtgaatcttgtatgaatgttcatagaaaactgcaaatgagt |
| | | accacgtctaacatgagagaatgatactggagaaatccaagtttagaagtcactacgaatcccagc |
| | | ggaaacaagggaattctgagcttctaataggcgtttaagactatttgcaaaattctggtgcgtaagtg |
| | | atattttcattgcgtagaacgctggtaaccactccggctagtataagcattgttagtcacttattatgaa |
| | | actccacactatcctttctggagaagcacacaaacttacatggtaaagctagaccattatcttaagcg |
| | | gtgagtacactgcaaccttgtaacaatgcttgtatgactactttttgtatatcttgagcaatattgttgag |
| | | gtggacatgtccaaaggtaatgttgttgggaatggaggggtccattttcccgtgcacgtagtgtact |
| | | agtattgggtgatagccttgcggcggatcaaccatgtattttaatccgttgactttcac |
| 422 | Symapivirus A | ttgggaaatccccaatgcttctttcaacaccgcctgactatgcggtggcgcttcggctcaaacaact |
| | | agtcacttccccctcttaactactacccaagacttctaactacccttacctacttatttgtctaaatttcaa |
| | | acttttattctcacgcgtcttataaacatcttttctatttgttatggtatgttttgtgatttgtgtggtgtatttc |
| | | atttaatgggatctagtggaccgtgccccggttgggtatccgctccctttaaatgtttgcaagcactct |
| | | tgacattataacctatcatttagtttacttgtttgtatgatcgtatttctgaatcgtaacatttatgcaattctt |
| | | tctcgccgagacttgtctaggagataaagttcctgcatatttagtgttacggttgtataatggagactta |
| | | gatagcttcacactgaggacgctttttcgctatccttttgacctgattcaggccagtgtggagttaatg |
| | | attgtatggatgggccctacaatttgtctaagacttggtgatagcctcgcggccgctcgccatttata |
| | | caactgaatagcggttgaaactctct |
| 423 | Sakobuvirus A | tcacgcgcttttccggtggtcacccaccgttagggagcgccagcgttcgcgcttccgctaccaggt |
| | FFUP1 (1x mut) | gacacactcctttcccctcccccattcccgttcccatcctctggactggtttctcctcacgattgacca |
| | | gcagctgggagctgttaccagacgttggacagtaagtcccggatgcactatagggctggtggcta |
| | | gtgcttggtaagcactcaacgccatacctaatgtgtacctcggcttgccctcctggtcgtggtgacc |
| | | ggctgtttctcttcccttggctcCagacgggctggtgtcctaccaccaccgttgcatgcagacctcc |
| | | ccctgcgcactcgaacgccctgtcccagcagggttagtatgtgctgtgcagatctgcatgtgacac |
| | | cccatccactggtagagcaggaagttgccctagctaacgcggcaagtattactttccgctacacgt |
| | | ccttgagattcctcggacctctggaactagggtgactgtgggcttgggaaaacccaccttggtcctg |
| | | tactgcctgatagggtcgcggctggccgaccagtggatgtagccagttgttttgggat |
| 424 | Rosavirus C | cagggagatctccatgaataatcttttccaccctctttagcgtctatgctattgaggacgggttggag |
| | NFSM6F | ccccgttgacccagcgtcagagtgtgtcggtagcaggctttctgctctcgccccatgccggccaca |
| | | cctcccattagtgatgtgaaggttgtaagttacatgtgaaaaggtttctaataattgagctgaatgtag |
| | | cgattacctaaggtgagcggattcccccacgtggtaacacgtgcctctcaggccaaaagccaagg |
| | | tgttaaaagcaccccttaggtaggccactaccccgtggcctcagttctcttagaagattcacttagta |
| | | gtgtgtgcactggcaactcttaagcagagctagtgagtgggctaaggatgccctgaaggtacccg |
| | | caggtaacgttaagacactgtggatctgatcaggggctcgagtgctgaagctttacagaggtagct |
| | | cgagttaaaaaacgtctatgcccctcccccacgggagtgggggttcccccacaccaattttagatt |
| | | gcact |
| 425 | Rosavirus 2 | ccaggcatggcgttaaacatgcattcccttcccctagtaacctcccttcgccccttccccacgttgta |
| | GA7403 | ccccctccgagatggctgctaaggcgcttgctgctacagcagtctcgtgtttcgggtgttataagtg |
| | | ctttcttttccactccactccctgcctatggggagcggaacggccttgtctcggtcgttgcttcttgca |
| | | gatcttcacccctccaggctttctggactcgccaggggtggagtagtaggcgcactgtctaagtga |
| | | aggtagcagtgttgttggcgaagagttgtggacctactttgagtttgtagcgatcatccagagctag |
| | | cggatctccccacgcggtaacgcgtgcctctaggcccaaaaggcacggtgttcacagcacccttt |
| | | ggatggcgggggtgcccccctccgcacttaaagtagaaaaacagcttagtagtcaaataacatgg |
| | | ctttcctcaagcattcagtgctacatgggactgaaggatgcccagaaggtacccgcaggcaacga |
| | | taagctcactgtggatctgatctggggccctgggccaggtgctatacacctggttaaaaccaaatct |
| | | ggtagtcagggttaaaaaacgtctaagtcccacccccccggggacggggggttcccttaaaccct |
| | | caactgacacc |
| 426 | Rhimavirus A | cgaattccggacatctcctttcgggggcgagcgtcaccgtgcccctcatggaggcaactgtgcctc |
| | | taatcggtgacccactgagaaaattttctttctacgtggctaaacaatgcaactttataataacacaaa |
| | | tttaatgcttaatcttaacaccaaagatttgaacatatgtttggaaagtggcacacttcaaacattgcat |
| | | agttgctaggggtgaagtccctttaaggggttgcagaggatctttcctctttatgagcggctaggagt |
| | | atcttcttgatattatgtggtcgtgcaactcacttcccagatgtatgacggtgtactaagcgattggaa |
| | | ctagtcataacctctttgaattttggtattgcgagtctagcagggggatatttaccgctaaagggtgac |
| | | acactcgtgagggtggcctttggtgtgtgtatatttattccgcccatcttgcatggggtgctaaaattct |
| | | aatgctgtgaaataaccattttctgaatacattctctacatttggagtcaaatatgaggaatgccactca |
| | | ggtacccttgacatgatcttggatctgagagtgggctaattatctaattatttggcgactttctaaaatct |
| | | tctgtttttagtggtgacaatttatggttataaa |
| 427 | Rafivirus | gtgtccgggaagcgactcaagcttttgactgagtctctacaccttcatccgtaacatctttaagtttatg |
| | LPXYC222841 | tgcctatggacctctagtgcactgccatcaccgggggtgtattggactggtttttccacaatccattca |
| | | tcctgaggaattttggctttgttactaggatggtcccaccacacgcttatctgtgcctattgtgtcaacc |
| | | atgttcttaagtagttgtgcccgtgggtgagtagataaccacaacaatccgataaagcatctcgcaa |
| | | ggatgtgagtaatggagtgtatgtgctacagagacccacaacctgaaccaagagagacacagtg |
| | | aggattgtaaagggggaactctttgaaagggcatgtcccgcaattcctactgactgacaccgggg |
| | | gttggtgtcggtggattttagcaaatcctgttactgggtgatagccttgtgcacttcacttggttcttgta |
| | | taagtgctgta |
| 428 | Rafivirus | tgcgaatttattcgcacagtctcttttcccccatcttgtgtgtgtgatggggtaagccgcagagtaata |
| | WHWGGF74766 | cctactctgctgcaaacacactcactcttttctatctactttatatcatgtaataataagtagggaacata |
| | | ttcaattcatattgttcatctcactgaacccgcatgaaggactgcattgcatatcctggacgaagtgac |
| | | gtggaatatttggacatttatggattggacaccattacgctttgtgcctctacggagatgtaaccataa |
| | | tcttaagtagtagtaccccagcacaagaggataaagtggcatacacgacaacgggtgttgctcgc |
| | | accttagtaatgtggatgttcacccttggagcgtgctgaaactctgtgggtaaagacacacattagta |
| | | caaatgtgggggaactcactgaaagggcatgtcccgtgtactggtgtgccggaaagtgggggtc |
| | | gctttctggagaacttagtagttcttgttattgggtgatagccttgcggcggatcaactcacagttttaa |
| | | tccgttgttttgcat |
| 429 | Poecivirus | actacacaatcgcaacacgcgcaagtttgtagtttgattggcgtgcaaatgtcaaatcaagcatata |
| | BCCH-449 | acacaatttggtggctgttggtgtttgttataggaattttggttgtgttgaaattgtggatgtgtaggaaa |
| | | tatgcacaattacgtcagcgtcaggagttttataacctggcgcaacaccaaaatggtcttcgcgcttt |
| | | aacatcaccagcgaggtgtaaacaaattgaagttgaattagatcgtgtataggccagggaaccatc |
| | | cctcccaacgccacatcttgtggggaagttgggataatggtgggtctatatgaattggtctgtagac |
| | | ccacagtgaagagtgaatagtatgcttgcggttccatttgttaatggtctagcatggggggggcgg |
| | | caaccccgtgaggggttccccactggccaaaagcccaggggttagtcatttcaaccaaggaagct |
| | | ggtaacctggtgacctgaacttgagtggtgagacccccttgctagagtgtgtaaaccgattgtaagc |
| | | attttgtttgcttagtatctgtggtataagcagtcaattttgtataggctcaaggctgtggtagttagtag |
| | | atgcccggaaggttattactgatccggggaccgtgactatacattaggtaaaccggtttaaaaacc |
| 430 | Megirivirus A | ttcgggacactggatgggcgacttggtggggctgccactctatcttgacctttcgttactgactttcg |
| | LY | gatctctgactcctccttgtctcttgcgtttggtccacggacggactaattggaatgtttactggctaag |
| | | cctcgttctgaaataccctagccaatgggttgtagtaggatcctggtgtttccattaaacctcttccga |
| | | ccatagtagctagagttatggctgtgtaggatgtgggtaagaccgctttttgcgtatctcccacaaga |
| | | caccggattatggatgtgtccgctggataaggctcgaaacctcccaactgaaggtggtgctgaaat |
| | | attgcaagcctaggttgtgtagaggcaagtagatgcctgccgcgacattcgtcttccgcccttttgg |
| | | gttagtagtgtacctacatggacgtggggctgggaatccccaccttgcataacactggttgatagac |
| | | ctgcggctggtcaagttactatggtataaccagttgaaatggct |
| 431 | Megirivirus E | gcttggcaacctcatatcgttactctgccgaccagtctgggtcgtgtggccacacaatgggattcgtt |
| | | ctgttgtgtagagtcacatggcattactgggctgatcggtggggatccgttgccacccctaaaccct |
| | | tacatttactggactgcttttcttggccccggaatgattcgctcacccgcgatgaggactgttgttctta |
| | | ttatggcaggattacgcgtctggtccgcgtaaggactaattcctatgtttatacgttactaccttgttct |
| | | gaacggtgggcgccaccccgcctagtaggatcctggcttatcgtgtagacctctagggaccacatt |
| | | agctagagtgtaggctgctatggatggagtagtgacccctttttgggtatcactctctaagactccgg |
| | | aatgtgtcatagtacgctggaaatccttacttgtttttccatgagggggaggtggtgctgaaatattgc |
| | | aagccacccctcggttaaaacagtttggtgccgcttatgccatattaccgccccttgtagttgggctg |
| | | tttttgcagctccgggttagtagagtaccatagtggacgcggtgttgggaatcaccgccttggctgc |
| | | acactgcttgatagagctgcggctggtcaagctaattgtggtataaccagttgatttggcat |
| 432 | Megirivirus C | ttcccgaccggtctggcaaaccggacggttatcctggttagatgtctgatggttgctggaacgtggt |
| | | ggctactgctgccaccttctggcttcctttaatgggcatctagctgggttctttgccacaatccatctta |
| | | ctctcttacccattttctattacccagacttgttgttaactggtaaagttgacctactggcttcgttttgag |
| | | actattctggtgttggtggacactctttccacaagtagattgtatggagttcatgctcgttttgaaccgg |
| | | gaatggcacaacccgtagtaggatcttgcctctgccatactaatctgcgcctgttgcttttagactatg |
| | | ggctgctaaggatgacattggaacccctttttggatattccatgtcaagtcaactgtttcatctggtgta |
| | | cgctggaaatccttgttccgaggtcttgtctggaggtggtgctgaaatattgcaagccacaggcagt |
| | | tccttggacttggtgccgctatcagatgctacaccctctatgggcaaatgttgaaccttagtggacgc |
| | | gtgagatgggaatccacgccggccatagactggctgataagctcgcggctgatcgagttgcaaca |
| | | gtaatcagttgatttgccact |
| 433 | Ludopivirus | tagacccccacctagcccttttccccgtcagtggggggcttactcactgggcatctgttaatctggc |
| | | ctaactagattgacaccactcccttggaacgtaactccacgctaactcactggctctacgcacagac |
| | | acacggtctttctgctatccccggggaagataccagatggcgaccggctgtcccagcggcctagt |
| | | agctactcgggttgagtacccaccacggttttgacgcctgctaaaattcaagagacagaggtaggg |
| | | gtgcttagtgtgtgggggaagttcccacaagcgaggcaaagcattgctccctcgcgtcaccgggt |
| | | gcaaggtaaattggctggacttccgctctacccttgctactcgccctcttcggagggttcgaagtga |
| | | cactaggtatacgcatggttgggaaaccatgcctggcctactactgggtgatagcctggcggcgg |
| | | gtccgtctcttggcttatacccgttgatttgggat |
| 434 | Livupivirus | tatctacatggggatccaggctgtatggaatgtctgtcttaacaagcactataccagaaagatccac |
| | | ccaaagtggtgggactgggactgtgaggtgagaaatcccgaaaccagccttctcaagcgtcgga |
| | | cgatctttctgttttagtgaacaccttgccttttaaatggatgacaacaccccttcagcaaatcgcaatc |
| | | tgaaatcccaaaagactgtttagccgaactctggtaatcactccggagaagtaggatacgcagccc |
| | | ctgtggactcttgatttcaggactcaaggtagctagagctggaacttcatggaatgacaaaggaata |
| | | tatgcacattgtgcgctttcctggccttgtagcccgtcgtgaggatatgtcgttgggaatcgacatctt |
| | | agtccagtactgcttgatagagtgtcggctggcacagttacctgagaataagtcagttgtacttaaca |
| | | tgaacaaaaaaaataactaccacaactaccacaatctaccaatacttgaattatgctgaatctcgtac |
| | | agtaaaaacgttccgtggaaggacaagtattgaagtgcggttacatcatccgatacgcgctggatc |
| | | cctca |
| 435 | Aichivirus A | cacccatacacccccacccccttttctgtaactcaagtatgtgtgctcgtaatcttgactcccacgga |
| | FSS693 | atggatcgatccgctggagaacaaactgctagatccacatcctccctccccttgggaggacctcgg |
| | | tcctcccacatcctccctccagcctgacgtatcacaggctgtgtgaagcccccgcgaaagctgctc |
| | | acgtggcaattgtgggtccccccttcatcaagacaccaggtctttcctccttaaggctagccccgat |
| | | gtgtgaattcacattgggcaactagtggtgtcactgtgcgctcccaatctcggccgcggagtgctgt |
| | | tccccaagccaaacccctggcccttcactatgtgcctggcaagcatatctgagaaggtgttccgct |
| | | gtggctgccagcctggtaacaggtgccccagtgtgcgtaaccttcttccgtctccggacggtagtg |
| | | attggttaagatttggtgtaaggttcatgtgccaacgccctgtgcgggatgaaacctctactgcccta |
| | | ggaatgccaggcaggtaccccaccttcgggtgggatctgagcctgggctaattgtctacgggtag |
| | | tttcatttccaattcttttatgctggagtc |
| 436 | Aichivirus | tactccattcagcttcttcggaacctgttcggaggaattaaacgggcacccatactcccccccaccc |
| | KVGH | cccttttgtaactaagtatgtgtgctcgtgaccttgactcccacggaacggaccgatccgttggtgaa |
| | | caaacagctaggtccacatcctcctttcccctgggagggtccccgccctcccacatccccccccca |
| | | gcctgacgtgtcacaggctgtgtgaagcccccgcgaaagctgctcacgtggcaattgtgggtccc |
| | | cccttcatcaagacaccaggtctttcctccttaaggctagccccggcgtgtgaactcacgttgggca |
| | | actagtggtgtcactgtgcgctcccaatctcggccgcggagtgctgttccccaagccaaacccctg |
| | | gcccttcactatgtgcctggcaagcacacctgagaaggtgttccgctgtggctgccagcctggtaa |
| | | caggtgccccagtgtgcgtaaccttcttccgtcttcggacggtggtgattggttaagatttggtgtaa |
| | | ggttcatgtgccaacgccctgtgcgggatgaaacctctactgccctaggaatgccaggcaggtac |
| | | cccaccttcgggtgggatctgagcctgggctaattgtctacgggtggtttcatttccaattctttcatgt |
| | | cggagtc |
| 437 | Aichivirus DV | tactccattcagcttcttcggaacctgttcggaggaattaaacgggcacccatacacccccaccccc |
| | | ttttctgcaacttaagtatgtgtgctcgtaatcttgactcccacggaacggatcgatccgctggagaa |
| | | caaactgctagatccacatcctcccttcccctgggaggaccccggtcctcccacatcctcccccca |
| | | gcctgacgtaacacaggctgtgtgaagtccccgcgaaagctgctcacgtggcaattgtgggtccc |
| | | cccttcaccaagacaccaggtctttcctccttaaggctagccccgatgtgtgaattcacattgggca |
| | | actagtggtgtcactgtgcgctcccaatctcggccgcggagtgctgttccccaagccaaacccctg |
| | | gcccttcactatgtgcctggcaagcatatctgagaaggtgttccgctgtggctgccagcctggtaac |
| | | aggtgccccagtgtgcgtaaccttcttccgtctccggacggtagtgattggttaagatttggtgtaag |
| | | gttcatgtgccaacgccctgtgcgggatgaaacctctactgccctaggaatgccaggcaggtacc |
| | | ccaccttcgggtgggatctgagcctgggctaattgtctacgggtagtttcatttccaattcttttatgtc |
| | | ggagtc |
| 438 | Murine | gtaacttcaagtgtgtgtgctcgtaatcttgactcctgccggaatgccgcccggttcagtgaacaaa |
| | Kobuvirus 1 | cagctaggcaagtccctcccttcccctgtggtcggttctcaccggccaccatccctcccccagcct |
| | | gacgtgttacaggctgtgcaaagcccccgcgaaagctgctcacgtggcaattgtgggtcccccctt |
| | | tgtcaagacaccgagtctttctcccttaaggctagcccggtcccacgaacgtggaactggcaacta |
| | | gtggtgtcactacacgcctccgacctcggacgcggagtgctgttccccaagctgtaaccctgacc |
| | | caagactgtgctgcctggcaagcaccgtctgggaagatgttccgctgtggctgccaaacctggta |
| | | acaggtgccccagtgtgtgtagtcttcctccagtctccggactggcagtcttgtgtaaagatgcagt |
| | | gtaaggttcaagtgccaaatccctggaaggagtgaccctctactgccctaggaatgctgtgcaggt |
| | | acccccaacttcggttggggatctgagcacaggctaattgtctacgggtagtttcatttcccatcctct |
| | | cttttttggcatc |
| 439 | Porcine | tttgaaaaggggggggggggcctcggccccctcaccctcttttccggtggccacccgcccggg |
| | Kobuvirus K-30 | ccaccgttactccactccactccttcgggactggtttggaggaacataacagggcttcccatccctg |
| | | tttacccttactccactcacccctccccttgaccaaccctatccacaccccactgactgactcctttgg |
| | | atcttgacctcggaatgcctacttgacctcccacttgcctctcccttttcggattgccggtggtgcctg |
| | | gcggaaaaagcacaagtgtgttgttggctaccaaactcctacccgacaaaggtgcgtgtccgcgt |
| | | gctgagtaatgggataggagatgccaataacaggctcgcccatgagtagagcatggactgcggt |
| | | gcatgtgacttcggtcaccaggggcatagcattgctcacccctgaatcaagtcatcgagatttctct |
| | | gacctctgaagtgcactgtggttgcgtggctgggaatccacgcttgaccatgtactgcttgatagag |
| | | tcgcggctggccgactcatgggttaaagtcagttgacaagacac |
| 440 | Porcine | ccaccgttacttcactccactccctcgggactggtttggaggagcataacagggcttcccatccctg |
| | Kobuvirus XX | ttcaccctcaataccacccaccctttccctcaaccatccctatccacaccccactgactgattcccttg |
| | | gattttgacctcagaacgcctacttgacctcccacttgcctttcccttctcggattgccggtggtgcct |
| | | ggcggaaaaagcacaagtgtgttgcaggctaccaaactcctacccgacaaaggtacgtgtccgc |
| | | gtgctgagtaatgggataggagatgcctacaacaggctcgcccatgagtagagcatggactgcg |
| | | gtgcatgtgacttcggtcaccacgggcatagcattgctcacccgtgaatcaagtcattgagattcct |
| | | ctgacctctgaagtgcactgtggttgcgtggctgggaatccacgcttgaccatgtactgcttgatag |
| | | agtcgcggctggccgactcatgggttaaagtcagttgataagacac |
| 441 | Caprine | gggggggggggggcctcggccccctcaccctcttttccggtggccacgcccgggccaccgat |
| | Kobuvirus | acttcccttcactccttcgggactgttggggaggaacacaacagggctcccctgttttcccattcctt |
| | 12Q108 | cccccttttcccaaccccaaccgccgtatctggtggcggcaagacacacgggtctttccctctaaa |
| | | gcacaattgtgtgtgtgtcccaggtcctcctgcgtacggtgcgggagtgctcccacccaactgttgt |
| | | aagcctgtccaacgcgtcgtcctggcaagactatgacgtcgcatgttccgctgcggatgccgacc |
| | | gggtaaccggttccccagtgtgtgtagtgcgatcttccaggtcctcctggttggcgttgtccagaaa |
| | | ctgcttcaggtaagtggggtgtgcccaatccctacaaaggttgattctttcaccaccttaggaatgct |
| | | ccggaggtaccccagcaacagctgggatctgaccggaggctaattgtctacgggtggtgtttcctt |
| | | tttcttttcacacaactctactgctgacaactcactgactatccacttgctctcttgtgcctttctgctctg |
| | | gttcaagttccttgattgtttttgactgcttttcactgcttttcttctcacaatccttgctcagttcaaagtc |
| 442 | Rabbit Kobuvirus | gggctataaatatgggcattcctcttcccccttccccttttgaagatgagtgcgcatattcttgactccg |
| | | cctggattggccgcccaaggcgtgaacaagcagctaggccaccatgacactgcggtggtgtccg |
| | | aacccgcgggtgccttcacgggcacctgtggtatgtaggactcccaccgtggtcttccctttccccc |
| | | tcaatctttccccctggttcgactaacgggaccagtgctggaacctgtccggtgaacggtatagca |
| | | ggcccccccggcagaaacacccggtgcttaccccttaaggctagcccccttccatgaatttggttg |
| | | gggcaactagtgggtgtacagttggcgtgaaccctccggtctaggagtgctcttgcccaatcctct |
| | | gtgtgtgccttgcagtagggactggcaatccttcgcgtaggtgatccgctgtgccatgccatcctgg |
| | | cgacaggaggcccagtgtgcgcaacctacgtcccttctgggtgctgcattgcattacctttggagta |
| | | agcttggtgtgccgaaaccccagggtttacgtaccactcgtggtgtgaggaatgtgccgcaggtac |
| | | cccatccttgaggtgggatctgagcggtagctaattgtctagcaccactttcttccttttttctttgctgg |
| | | tcacg |
| 443 | Aalivirus | ttgaaagggggtgctcagggtagctccctgagctcttccctccaccctctttcaacgtctggcccac |
| | | gatacgggccacctttcaatcttaactaactatccctttaatctatttggattttctggtttagaataatttg |
| | | gaacacataattggattatcttttaggattgtggataggatttgttcgggatatcactcccttcctgtgct |
| | | aacacatattctaattccctcctttgtctattatctcttggaggtggtgctgaaatattgcaagccacttg |
| | | agtgtatagatgaagtaggctcaagatgaatgttgtgttactcaaggcaagtgtagctatcactaaga |
| | | tattggtaacgtgaaacggattaccggtagtagcgtgatcttccgtcttagtgctctagtgactagag |
| | | gacaacgacatggcatcacatatcttaaccctccagttttggcatccgggacagaatgggctggat |
| | | atccgctttctttctggggtatgtgatgggtggtattggggtaaccaccttgaccatgacgctcgata |
| | | agagtgaccgcctgatcattgaaacctctagtataaaattcaggctgaaatc |
| 444 | Grusopivirus A | tgcctgagtaggattgtgaatttaggtatgagagggttagccaacccattctgaaccataatagatac |
| | | gtcaatctgaatccatctaaatctatctcttaggcagtggtgctgaaatattgcaagctactagggata |
| | | gacgtgatctgattcaagaacctatctaatgtggtgatgagaaggctaggtttatccatagtaatccct |
| | | tgttctgaacaggcaatgcacatgctctagtaggatctcgggctctgcgattggctctaaaccgacc |
| | | aatccaggtagaggcactaagtgtaggacttgccaaaatgtattacatgctggtaccgactcactag |
| | | tctggaaactccacactgaaagtgactggggggggccccatcacatttgtgctactgcttgataga |
| | | gttgcggctggtcaacttggattggtataaccagttgaa |
| 445 | Grusopivirus B | gccatccgtaggttctggtaaggttccatcaactgttggggcgctagttgctatgaccgcattcacg |
| | | gacggatgatttatagtatcacccaatccgggcacaacttctttagccacttcttccacattactaagg |
| | | gctctcttgccgagtttcaacgtctagtccacgacacggaccttcctacttttctatcttcttattttctct |
| | | actaaattggtatctggtactgaagatatgcggattgtgattttgtgcctgtctaaactaaccctattcta |
| | | gggttaggtgggtaccatatactaatggtgaacaggattacctatgtatccattagtccctatggatct |
| | | ggcgacccacaaactcatgttcatagagaggctaagctgagtgctcgccgaataagcattgcttca |
| | | ggtgccgactattgtctggaaaccactcagtgatagctataggggggggccccgtagcatctgcct |
| | | tactgcctgatagggtggcggctggtccatgaacatgcagtaaccagttgacttgac |
| 446 | Yancheng | ccttagggtctggaatgcgtcctttctgggcacttccacaatcctaaggtaattttcaacgccagcga |
| | osbecks grenadier | tggagcgatatccaaagaacctttatgttttagttcgtcttgtatgtttataaaatataaaattgggatta |
| | anchovy | gcaacccacaaaaacatttttgttattctcaccacatgagagggtggttaaacctcttcgtaacctatc |
| | picornavirus | ttgcttgattggctacttgggctagatttaggacaacctctttagcaagcctaaattactcctcgtactt |
| | | gcacctggtaacaggcgtacctggaggttacggtggcgctaacttggacttctcgttaattcgtgca |
| | | agtttaaatgatgcctattttgaatacaagaaagtatgatagtaacttagggcgtgaagttccgcttaa |
| | | cataaggcagtataagtactaagataaggtgtaagacctaccttaataactgttgtcttttctcatggtc |
| | | tttccgtgggagcccttgctaggggtaaagttaagtattctcaaataatttttcattcaaactctttctctc |
| | | tgtttt |
| 447 | Turkey Gallivirus | ccactcgcacttcctggatagtgcgttagatatgcccgacatatcgcttccaggaccaaagccccc |
| | M176 | cttttctctttcccaaccagcttcgccactcaagctgtaattccatgtccggtctttccggccttagtatc |
| | | atggaaatgtggtcgtgctcaaatgaaattgagttgacattgatcaatgaaagttgcactgaactttg |
| | | ctaaactggctagcgccacctggtgtgtgccgttggtctcctcacatggtaacatgtgccaacggg |
| | | cccgaaaggctagtgggcaattaccgctccaagggaggggtacccaccccgacctgaacagcg |
| | | gtaatgaagctcacctcccaggctctgaccccgagaagtttagttatttagtaggtgtaattagtactt |
| | | gtgattggtcaatttgatagtagtttgaaacgttatggatgaatgagtagaccccctgaaggtacccc |
| | | attacatgggatctgatcagggccacattctgcgtgtctccccgcacttgtggttaaaaccatgaaa |
| | | gttcatcccaaacaatcttttcctcttctttttttttagtggtgacaacctactggattggtgattaccaat |
| | | ctgtactagtgttgtattaagacttgttgtgtggagaaaatggactctttcaagaagatttttg |
| 448 | Falcovirus A1 | taaaaggggacgcggtgtggcagctttggctgtcatgccgtgttctccttttaccccaaggactagc |
| | | cttgggggttttccaaattcctttccctgtaggctttacttctctttatctatcttttctgtaactaagttttgc |
| | | ctattctaaaaatattttagaatgtgtttggatgtaactaagtttgtgcctgccctaaaaatattttagggc |
| | | ttgtttggataacctcgtcccttgtgttcagtgccgcacaatttgctaggcactgttcacttcctttgtttg |
| | | tccattatgtatgctaaggtatgaattccatcatatgcttagcctctacatgcataatcttattccctccct |
| | | ggtgcaaactacgcccccaacatatgtgaatcttttaagcatattcctgaccccacacatatatatgtg |
| | | ttctcgtgaattcccccaccgtgaggtggtcacttggacgtggtgtgtgtcacacagcatatatatga |
| | | tgcaggatgttgtttttaagataagcatatgtccttagtgctttgcatcatttcctccacaccccgtgaat |
| | | gcggctaatcttaaccctgttgggtccgtgggtaaaccaacccattaaccacaggacggaaccga |
| | | ctactttcgggagtgtgtgtttctttttcttcttttgtcact |
| 449 | Tremovirus B | ttcaaatggcccctgggttgatacccagtggtcatttggacactttggtaaggaggtgtaattatcctt |
| | | cccatgtggaacctagtgcttaggtttactttatatgttctttgtttgtcctttgtactttctatcgggcaat |
| | | cttgttgttcaatacaatatgtatttgaactgcctaagataaattcagttttcaaccaacccctctcttgg |
| | | ggttgtgtctttctttctttcttatatcctcttaagctgacttacttgctaatccgactcctcgtcaacggg |
| | | agggtaaagcagtatcactagggtattgtgatgtaggagaaaaagtaagtagagatagtgcatgta |
| | | acgaaagtgacttggtactttaaactctcttaatcccaaagtgtggtattggtcatgttggagtaggct |
| | | acgggtgaaactccttcacatttagtaatgtgttcacacgctaacgctacggtagatgacagactag |
| | | gtcttattctcaacgtagggggacgggtgtatgttcatgattagccacatattaaggttttgaggggct |
| | | gagtcatataagtatgtgcattaatttctggtactggtccctggggactggcccttttctaggttgatttt |
| | | agtttccccaatttttaaaaactaatgagatttacgac |
| 450 | Didelphis aurita | tctttggtctggggaactaaaataccagacccgcgtttgcctagcgatataggctttaattgttgtttgt |
| | HAV | cattgtgcgtttgatatgtgttttaatgtaaataataattctagcaggttctagttcttgatcatgtcctcttt |
| | | aaggcactcatttcaacttgctatctttcttttcttccttggttctccctacaccaaatgcactggccgct |
| | | gcgcccggcggggtcaaccacatgattagcatgtggctgtaggtgttgaaggctgggacatgaac |
| | | atcaatggaatagtgcgcatgcttactggggtccattgaagtagtgggatctttctattggggtaggc |
| | | tacgggtgaaaccccttaggttaatactcatattgagagataccttggataggttaactgtgctggat |
| | | atggttgagtttaacgacaaaaagccatcaacagctgtggacagaacctcatccttagattgctcac |
| | | tatggatatgtgctctgggcgtgtttcttgcatgatggccattggtcaattcatgcctgggccaatgta |
| | | ggattagccttaaattactttttaaaagtagcctcatttagctggactaatggtggggcgtatgatcctg |
| | | catttggcctctggggtaatcaggggcatttaggtttccacataatagcaaat |
| 451 | Hepatovirus G1 | gcaaggggtggttttaaccttgcacgcgtttaccgtgcgttaacggttttccatgtttgtatgtcttgttt |
| | | gtattatgtgttttgtaaatattaattcctgcaggttcagggttctttaatcatgttgggctgtacccacac |
| | | tcaacttttggccataagtgagtttcttaacgaaccttttaacacaggatgttattagggcccaatatttt |
| | | ccctgaggccttctttggcctctattttttccccttttctatctccttgtattccgggctcacgtgatgcca |
| | | atggactgacccatgcgcccgtgggggttaactactggagtagccagtagctgtaggtgctaaaa |
| | | gtcacgtacgtgtaagactggacgagacctctcagctataactgaaagtagtaagtatgtctgaact |
| | | tcttgaaggggtaggctacgggtgaaaccccttaggttaatactcatattgagagatacctctgatag |
| | | gtgaaggtttccggtagaggtgagtttaacgacaaagcctctcaacggatgtgggcccacctcatc |
| | | agcaagatgctttcatacccaataccgtaggggctgggttgttgagttcagtcccaagcgtccctcc |
| | | cgcaaggttgtaggggtactcaggggcatttaggtttccacaattaaacaaataca |
| 452 | Hepatovirus D | ctttggatgcccatagtgcgggggtataaataccgcactccctttagctgttccgagggtatcggaa |
| | | cctatatgtttgttttctgtctgtctgtcagctttatgtgtgctcgtcccctttagggcactcatttcagctt |
| | | gctttcattcttttcttccccggttctcaccttaccggaggcactggccgttgcgcccggcggggtca |
| | | acctagtgattagcactaggctgtaggtgtctaaagtggtgacattaagacttggtaactgatttcag |
| | | cactgttaactgatgttggggatgacttgattgatcttctggaaggggtaggctacgggtgaaaccc |
| | | cttatcttaataccactatgtagagatagattcagtaggttaagggcagtggataaggttgagttcattt |
| | | tggacaataaaccttcaacactggtggacccaatctcactgaccagatgctttcttgactgatccttc |
| | | agaggggtgattcttctgaataggttgccttgacactgatgcctgagacccattgggtcgggcctta |
| | | aatcatggaactccactggactttcatggcctagcttctgccttagacagactctggggccccacga |
| | | ccctctgggcccttcggggtactcaggggcatttaggtttttccacaattaaaagagtta |
| 453 | Hepatovirus H2 | gtcatgtttctctttaagaacactcaattttggccataagtgagactcttgtcgaacctttcatgtcagg |
| | | accatgttagggccattatccttttccctggggcattcttcttgcccctgtttcatctttctatcatctttctt |
| | | ccgggctctcacaatgccaatggagcgaccgatgcgcacgtcggggttaacccatggattagcc |
| | | atgggctgtagctgctaaaagttgtgactcctgaagcatactatcaatggtagtagatgtaactgaaa |
| | | cactgaagcttctctgatcttgaaagaagggtaggctacgggtgaaacccttcaggttaatactcat |
| | | attgagagatacctttggtaggttaacgttggcggataatgttgagtttaacgacaataaacattcaac |
| | | gcctgtgggcgaacctcaccaatttcatgctttgaagtgaatgtgcgtagggtctctatcggagatg |
| | | ctatgtggatggtgccctccctggaaacaggttgtaggggtactcaggtgcacttaggtttccacatt |
| | | ttaaagatttttc |
| 454 | Hepatovirus I | ggctgcctgtgtctcaggggtaagtactggggccgcgttgaccgtgcggtacggttatgcttttaga |
| | | ttaggatgtccgtctgtccggcactctcttttgcttaaaatggccttaaatccatgggaggcgtaacca |
| | | tgggccctttgttacctagacatgattgcattgggggccgtccttggggcttaggccccagccatttc |
| | | tcttgactcgtctaagagtttacttcatccttttctttactttattttccaggctctcagcatgccgacggct |
| | | ctgaccactgcgcccggtggggttaactgcatgattagcatgcagctgtaggagttaaaagtgctg |
| | | acaggccaattctgacgtaagtccactctatattaacttgatcaagtaaggttgattgatctttgtgaga |
| | | gggtaggctacgggtgaaaccctctaggttaatactcatattgagagatacctccagaaggtgaag |
| | | gttggcggatattggtgagttcttttaggacaaaaacctttcaacgcctgtgggcccacctcactggc |
| | | acaatgctttcatccccaattgtgatgggtagtttggactgaaatcaggagtaacctgccctacgagt |
| | | ttaggggtagttcaggggtatttaggcttccacatttgatagagtttatgagagtgagcc |
| 455 | Hepatovirus C | ttcaaaagccccagcggggtttcattaccccgctgtggcttttggacttccctaggatggggaagta |
| | | aattaccatcctcgcgtttgccgtgcgttaacggctacttttcttctagctgtagaagtaaaattcagca |
| | | tgttttatgtttgtttgtcttgtttgttatatacatttttacactcctacaaatgcacatgaagaacagtttgt |
| | | agagattaacaaacgcttagctgaacctaggtggtgaatctagtagtaagataagtagaggaagct |
| | | ataccttaagttggttgggccctcgtgtttgctctataaacaaaaccaagtgagtagagtggatgaac |
| | | agtactaaatccctgagtacagggaacctcacaggtgtgatacacttatgtctatgtgacctggttgg |
| | | aggttgggcgtgccctatgatactggagtgggagatcttttggggaacccacgttttcacactgcct |
| | | gatagggtcttgccgagagactcacttgtttcggctgtacttgtaac |
| 456 | Fipivirus A | tgcgggtaaactcccgcatgtgtgaatgaggcgatgtcccaggaactaactgccgatcctggtttta |
| | | actacgatccgtatttgttactaatgcgatatccccccattgtttgcctccatgttgttttcaacgcttttg |
| | | gccttgagtgttatcaagtgttttagcgacatagtgggaagctacggctgcgtccccatttttgagtg |
| | | gcgacccagttttagtggccactctgtccctgaactgcgctataatgtgaatttatgttcacaaaaac |
| | | ggactgatgtaactgttaatgactaaggaatagtacctcactgaagtatcaagaccccgttcgagcg |
| | | gtgtacatatatggatggaaaccttgtctgagtcatctcgaatactaatcaatgagggatgtcgagta |
| | | agcatatcatgaaccacatagaatagtggggtttcggggttagaggctctctgcagcaatgtatctct |
| | | aacaccatggccgaaatgagagatagagaccacgatgtttgtgtgtaagtaatgatgtgtggaaag |
| | | aaaattctgaatgttggtatgatatcagtctaaggggagtggctcacctaagagctacccaaacattt |
| | | cacagcagacaacataacgtactgagagtagttggaaggttccagaaatcagt |
| 457 | Fipivirus C | cgcggttaaacccgcgcaaccttctttcagccgcgtctgagtagcgcggttagtcctgatacacagt |
| | | ttcctgttgggtactgtgtcttcgggtgaatgctcttgtgtgaatgttttaggctgtttaagggaagcgtt |
| | | tccccgtgcgctgtgagggtttctcacgctctttcggggtgcagtctcttctgttgttcattaagatgta |
| | | tggatgcactgttgtgaaggatttgtgaactggggatcgacaccccgtgaggggtgccccagtgtc |
| | | cataggagtttgctggagaggtgtgttgctgtagtgactatccgtgacctggcattctaaggtgttga |
| | | ccccaacctgtgagggtctggatcgcagtgttgaagtgctttggagggttcaatggggtttctgtagt |
| | | ggatattatgtgcttgacgactactggtacgagtgtattgggggtctacatgtgtga |
| 458 | Fipivirus E | ctcttccgatcttgggggttcgcccccatgtctcatttcaactagccgtgtgtctagttaacgcaccgc |
| | | ctcaccctggtcgttatcgggtcggttcttgcgaccgttagatcgtgagcgtttctgaggatcagttc |
| | | gtataagttctccggtgtggcgaccgtaaaatcgtcacgtcccatgcaatagatgacgttaaactcg |
| | | tttgccagttacataaaggaatgttgttacttttaaattgtctgttacatttaacatcttgccagtatgatg |
| | | ctactgtacactacgggtgtaggaaccttgtagtgtgacgtatcactcatatgtggatgggtgctcca |
| | | gacctttatggaagctctcagttagtagtgatccttgacttcattgagccctggtaacagtggaagtc |
| | | aagatgtatatgttgctcaacacacttcggtgctacgaagctgtttgtggaagtactggcgaggttca |
| | | ttctgaatcatatgtttgtcacatagtcagggagtgccgtcgcttacgacggaccctttttctttataatt |
| | | acaaatctgtgtctcaagtgttgttggctggttttcttcttctgttttcattgttcatatatatacgtcagagt |
| | | gaaagactcggtatatacaaaactgatccaga |
| 459 | Aquamavirus | ttcaaaggtggcgggagagttggcctcacgctgtttagcgtgagagctggctctcctgccccttcc |
| | | cctgagccggggatcttggctcattcccctcttttctatcctccctcattggactttacggatgacccg |
| | | gcataaacttgacaaccgatgttggatttcccttgtggctgtgatggaggacataccctcgggtgta |
| | | gttgtgtgcgtgtcgctctgcgactcgagcttcaaagtggtgctgaaatattgcaagcgtcgttgctc |
| | | gattaacggagtggtacaatcctatgaacccaagtgcattcatgcgaaagccccggaggggtgag |
| | | tagcatggactcgaatcagaagagctggagctcgcttggtacggcacgtagcattgctttgcctaa |
| | | agaccaagggggtatggctataggtgggggcctatagcttgtccagtgctggttgacagactcgtg |
| | | ctacgcgtctggttcgagtataagtagctgcaactcact |
| 460 | Avisivirus A | ttcactcgctttccccccctctctataggggggtcttttaattcttattaatttcctactttactatcaaatt |
| | | tcttctaagtagggactgaggtcacttagccctccctctcctgggctttccagggttatagaggttcta |
| | | aagctaagccatgtgtcttgagctacacttagtacaaaggtttagtaatgattgtacatgccagtaac |
| | | cttctagtgcccatggattaaagagtggtaacactctccatggggcccgaaaggctagtgggcata |
| | | gttggcatcaaggaaggggtccccaccccaacctgaattgctggctagaagctcaccttagaaga |
| | | agtgctgggtgacaacgtgtccaatcgtgaacgactgatggaaacgtgtggagatggatatgtgg |
| | | gggttcactgagtagatgccctgaaggagaaatctgatcaggggcccgtgactatacgctaggta |
| | | aaccgggtataaaaaccatgaaaggtggcccaaaatctcttccttttattttatttctatgttggtgaca |
| | | gtcaag |
| 461 | Avisivirus B | caccccctactgccctaacccccaaagttagttatagggtggctccctacccttactccacggggta |
| | | agccctaacccggttgaatctcaagatcagccttagcgaggactattagtaccgctcaaaccctttg |
| | | cctgtagtgcccaggggtcacagaggggtgaccctctccctggggcccaaaaggctaggtggca |
| | | agacagggtccaagtgaggggctactctaagtagccccaagctgaacatcctgtctgaagccacc |
| | | cttgcagggccaggtttgattggggaaactagacaccagctttgtcctgggattggggggatatcg |
| | | agttagtccaggaggtgcgagtagatgcccccgaaggtaccccaggcacatctgggatctgatcg |
| | | ggggcccgtgactatacaataggtaaaccgggttaaaaaacatgaaagcgcctctctctttcctact |
| | | tcttttattgactggtgacaaaaatagcagt |
| 462 | Crohivirus A | gttgaagtccatttcttgcttgcccccgatgaatcctgttaaggcctcacggccctaagggtgaaact |
| | | cggttatcccctcctgtacttcgagaagattagtacaacactatgaaatctacatcttgtgatccggga |
| | | taaccccaatcccagaaacctgtgatgggcgtcaccacccctcttatggtaacataagggtgtcgc |
| | | cgcgttggcacaggaccctttgggctggatgtttttagtaatggtgtcgaaggtcctattgagctaca |
| | | ggagtttcctccgccctggtgaatgcggctaatcttatccctgagcctaaggttgcgatccagcaac |
| | | ttgatggtcgtaatgcgtaagttgggggcggaaccgactactttccagaaggcgtgtttctttgttttg |
| | | tctgttactatggtgcatgatatagatattgaatatttgatctttttgagctgtttcttatcttattgctacatc |
| | | ctttcaggtgttggatttacattttggttaataag |
| 463 | Kunsagivirus B | gattttctggttatcccttttggacttggtaggggcccacgtgcccacccacctctgtgtgtgttgattt |
| | | ctaatcgatgcctggcagtggcggccacctctccttactggtaaacctccggtgagtgaagttgtca |
| | | agctacaggtaccgtgcaggatgaaatgcgcacatgtgaacaaactaggagtcatacaccgggtc |
| | | aaactctggaaacggagtccgggactctgaccttggttgggtgagctcgaggcatcacattgatgg |
| | | acgcgattcgctatccttccctagtaggaccttgtggtgtacccctggttgggaatccagggctggt |
| | | cgggtgcagggtgacagcctgttctccacctcaaccattgtaggagaaatcaacccct |
| 464 | Limnipivirus A | ttctttggatatccatttaacgtgtaccctatacgataattggggtggattctggatgcctagttccagt |
| | | gattggttaagaactcgtttactacgtatagtatgattagcaaagtgctcgattgatcacgtaatgatct |
| | | atgtggttaaaaacccagtagtatggtatatactcagtagtgtacactgtgagtacaactcttggcgta |
| | | gagagaacaattcacccgaatccgtggcgtatccatggaaataagtttacctaattgtatgttacaag |
| | | gcatatgagacatttatgagatatggtttattttgactaaacgagtgtagaggtggtggagtctatcca |
| | | acttcaagccatgcaattgttgtgttgattgatatcattgaccatttttgtggattgtgtacacatacaatt |
| | | tgaaaattaaccccctcaagaataagacatgggaccattcgtggtagataccgtgctcggatgcttg |
| | | agattagatgggttagactagttttggaatgagattgccgagaaagtcccgctagacatgttttacaa |
| | | gtcgtggtattccgctagactttttcgcagacacatggaagggtccatgtgttgtgcaattgcagggt |
| | | gacagcccaactgcagagttttccttactagaataaaaatctgttgtcaatttt |
| 465 | Limnipivirus C | gtttctgagcactggtaagagcttagacaaacgtttttaaaatttattttctctgcaacttttgtttgtgttt |
| | | atttttatttgttaattttgcgcctaagcatttgttgcgaagtatttgattcattagtaatattacttattgttta |
| | | tttagatggtattcaaagtggtgggagtatcgaacccaagcgtcgtatgctatctccttgaacaattttt |
| | | aatcattgcgaagtgatcattgaaaaggataggtgtttaagaactcaaagagtgttaataatgttggg |
| | | tgacaggtgtccccatagaatttattaacatgatttggactggttatctagtaagaagaaccatcgaa |
| | | cgcacgagcgagcattgcttgggggcagttaccctgcgtcgatgtaagtgtgtaccggggggtg |
| | | cacatgttgattctttatggcctgatagggtgcgtcattcgcgcctagataattagtataatgcgaatg |
| | | gaataaatttac |
| 466 | Orivirus | ggtcccaggccaatattcttcgtaaggcttggttccaattttccaccactcgtgtttgggttctggccta |
| | | tggtacccagaggggcggtttgggggaattaactccccctcccctgtggtcctataccaccccaca |
| | | cctctgtgggctttctttactatcttcttgttttccgacttttaaacactaggcaggcgcgcctagtcata |
| | | caccgcccggctggtctttccagctcttgtgggcggtgcgcgctggtccatcgtgcccagcgacat |
| | | agcaccttgtggacacctccgaacgccctcccctgtatggggtggtgcccaggggtttcagtgtgg |
| | | tgacacactccctggggcccgaaaggctagtgtgcaacaggtgaggtacagccagctgcccccg |
| | | tggctggagggaccaagcttgtgaagcacacctcaccttcttggggggggctagtaagtggtga |
| | | aagcatagtgtccgtgtcgctggccaacactttgggtcaagtccagccactcagtgagtagatgcc |
| | | caggaggtacccctagtggatctgacttggggcctgttacttaatgcaggttaaaaactatgaaagc |
| | | tgagtagtgtagcccggctggtggcttctcttccttattcattctattttatggtgacaaacgcaactga |
| | | agcc |
| 467 | HAV FH1 | cttgatacctcaccgccgtttgcctaggctataggctaaatttccctttccctgtcctttccctatttcctt |
| | | ttgttttgtttgtaaatattaattcctgcaggttcagggttctttaatctgtttctctataagaacactcaatt |
| | | ttcacgctttctgtctcctttcttccagggctctccccttgccctaggctctggccgttgcgcccggcg |
| | | gggtcaactccatgattagcatggagctgtaggagtctaaattggggacgcagatgtttgggacgt |
| | | cgccttgcagtgttaacttggctttcatgaacctctttgatcttccacaaggggtaggctacgggtga |
| | | aacctcttaggctaatacttctatgaagagatgccttggatagggtaacagcggcggatattggtga |
| | | gttgttaagacaaaaaccattcaacgccgaaggactggctctcatccagtggatgcattgagggaa |
| | | ttgattgtcagggctgtctctaggtttaatctcagacctctctgtgcttagggcaaacactatttggcct |
| | | taaatgggatcctgtgagagggggtccctccattgacagctggactgttctttggggccttatgtggt |
| | | gtttgcctctgaggtactcaggggcatttaggtttttcctcattcttaaacaata |
| 468 | HAV HM175 | cgccgtttgcctaggctataggctaaattttccctttcccttttccctttcctattccctttgttttgcttgta |
| | | aatattgatttgtaaatattgattcctgcaggttcagggttcttaaatctgtttctctataagaacactcatt |
| | | tcacgctttctgtcttctttcttccagggctctccccttgccctaggctctggccgttgcgcccggcgg |
| | | ggtcaactccatgattagcatggagctgtaggagtctaaattggggacacagatgtttggaacgtca |
| | | ccttgcagtgttaacttggctttcatgaatctctttgatcttccacaaggggtaggctacgggtgaaac |
| | | ctcttaggctaatacttctatgaagagatgccttggatagggtaacagcggcggatattggtgagttg |
| | | ttaagacaaaaaccattcaacgccggaggactgactctcatccagtggatgcattgagtggattga |
| | | ctgtcggggctgtctttaggcttaattccagacctctctgtgcttggggcaaacatcatttggccttaa |
| | | atgggattctgtgagaggggatccctccattgccagctggactgttctttggggccttatgtggtgttt |
| | | gccgctgaggtactcaggggcatttaggtttttcctcattcttaaataata |
| 469 | Parechovirus F | ggtcggggagatgtgttcatgatcggttaacaccatcatggatcatctctccccgacctctttttgacc |
| | | cagctatgggttaaatagtacttttcttttctcttttgctttcttttgtgttttgtttgttttgcaacatataaca |
| | | agcattttatcagtattagtgtctgcaactgtataacaagcaaggtggagcaatcatgcgagtatatct |
| | | caattgaattgtgacacacaagtgtgcactatgtggaataaatgccattttggccaaacctggttagc |
| | | cagaccagtagtaggacaatttggcacccttagtgggcgcgacctagatgctagggatgagcaaa |
| | | cctatttcccctgagtacaggggctctccttcacctctacattttggacctctttttgagtatcctcgata |
| | | gaaggtgaagtgacggtgtaccggatggttaattgatctcattgctgggtgacagcccgctaggac |
| | | caggcagcatctttgtatggacctgtacatgtaac |
| 470 | Parechovirus D | acatggggcaggtgtgctgtgccaagagcaacactacggtggccgagccgatggttcgtcacca |
| | | cgtagtaggactccgtagtgcttggttacggcggacgtaagtcagttgagtgatgtctaagtggcaa |
| | | accatgagtacatggtaaccttgtgtggactcgcgggacggaatttcctatcccattgactccttgta |
| | | gcaaggtgggtatacccaaccacaatggcagcaccctgggtgggaacccaggggcctggatta |
| | | gtatccagtcacacagcctgatagggtggcggctcagccactgaccagcgtctctaaataattgtg |
| | | agctgttcatgcacc |
| 471 | Parechovirus C | cggtcatccccctttccccacagccggtgtgggttctaatcggctcctactaaacacctaagcatca |
| | | ctgcgcctctatctctcctatccacaggtctaagacgcttggaataagacatgtgggtgcaatagga |
| | | agattagctagtccaatctctccttccagctacgcttctcccttcgatgagcgtagggggggccccc |
| | | acctccctcatctctggatagggctcttgctacggggctttcccgtctggaccagcaggcccactg |
| | | gtgcgcttccattcaagtttagtgtgcattactgtctgaaatattgctttgctaggatctagtgtagcga |
| | | cctgcatattgccagcggacttccccacatggtaacatgtgcctctgggcccaaaaggcatgtcttt |
| | | gaccgtatgcagtacaaccccagtataggtcctttctatggcagtatggatctcagtgatgagtctat |
| | | acagaatatggaagtggttcggatatgtcagcccgaaggatgcccagaaggtacccgcagataa |
| | | ccttaagagactgtggatctgatctggggcccaccaccttcggggggtagaagctaaccatgcct |
| | | tgggttaaaaaacgtctaagggctgaccagacccgggggatccgggttttccctatcttgacctact |
| | | ctaatc |
| 472 | Ljungan Virus | ctcattgcccacacctggttggttcccaggttcatacaataaccatcaataaacttttaacatctaagat |
| | 87-012 | agtattatcccatactagactggacgaagccgcttggaataagtctagtcttatcttgtatgtgtcctg |
| | | cactgaacttgtttctgtctctggagtgctctacacttcagtaggggctgtacccgggcggtcccact |
| | | cttcacaggaatctgcacaggtggctttcacctctggacagtgcattccacacccgctccacggta |
| | | gaagatgatgtgtgtctttgcttgtgaaaagcttgtgaaaatcgtgtgtaggcgtagcggctacttga |
| | | gtgccagcggattacccctagtggtaacactagcctctgggcccaaaaggcatgtcatttgaccac |
| | | tcaggtacacaaccccagtgatgcacacgcttagtaatggcttagtaacaaacattgattgatcattt |
| | | gaaagctgttaggaggtttaggtatgacgggctgaaggatgccctgaaggtacccataggtaacct |
| | | taagcgactatggatctgatcaggggcccaccatgtaacacatgggtagaagtcttcggaccttgg |
| | | gttaaaaaacgtctaggcccgccccccacagggatgtggggtttcccttataaccccaatattgtat |
| | | a |
| 473 | Parechovirus A2 | gccgtcgggccttacaccccgacttgctgagtttctctaggagagtccctttcccagccagaggtg |
| | | gctggtcaaacaataccaaacgtaactaaacatctaagataacatagccctatgcctggtctccacc |
| | | agttgaaggcatcttgcaataaaatgggtggattaagacgcttaaagcatggagtcaattatcttttct |
| | | aactagtgatcttcactgggtggcagatggcgtgccataactctattagtgggataccacgctcgtg |
| | | gatcttatgcccacacagccatcctctagtaagtttgcaaggtgtctgatgaggcgtgggaacttatt |
| | | ggaaataattacttgctgcgaagcatcctactgccagcggatcaacacctggtaacaggtgcccct |
| | | ggggccaaaagccacggtttaacagaccctttaggattggttaaaacctgagtaattatggaagata |
| | | cttagtacctaccaacttggtaacagtgcaaacactagttgtaaggcccacgaaggatgcccagaa |
| | | ggtacccgcaggtaacaagagacactgtggatctgatctggggccacctacctctatcctggtgag |
| | | gtggttaaaaaacgtctagtgggccaaacccaggggggatccctggtttccttattttagtgtaaatg |
| | | tcatt |
| 474 | Parechovirus A3 | agagtccttttcccagccagaggtggctggttaaataatacctactgtaacaaaacatctaagatgta |
| | | acaaccacacacctggtctccactggccgaaggcaactagcaataaggcaggtgggttcagacg |
| | | cttaaagtgtgttgtacatattcttttctaacctgtgttttacacagggtggcagatggcgtgccataac |
| | | tctaacagtgagataccacgcttgtggaccttatgctcacacagccatcctctagtaagtttgtaagat |
| | | gtctgatgacgtgtgggaacctgttggagataacagtttgctgcaaagcatcccactgccagcgga |
| | | tctacatctggtaacagatgcctctggggccaaaagccaaggtttaacagaccctttgggattggtt |
| | | caaacctgaactgttatggaagacatttagtacctgctgatttggtagtaatgcaaacactagttgtaa |
| | | ggcccacgaaggatgcccagaaggtacccgtaggtaacaagtggcactatggatctgatctggg |
| | | gccagctacctctatcttggtgagttggttaaaaaacgtctagtgggccaaacccaggggggatcc |
| | | tggtttctttttaatttaagtaatcact |
| 475 | Parechovirus A8 | gggccttataccccgacttgctgagtttctctaggagagtccctttcccagccctgaggcggctgga |
| | | taataaaggcctcacatgtaacaaacatctaagacaaaataatttgccttgcacctggtccccactag |
| | | ttgaaggcatctagcaataagatgagtggaacaaggacgcttaaagtgcaatgatagttatcttttct |
| | | aacccactatttatagtggggtggtggatggcgcaccataattctaatagtgagataccacgcttgtg |
| | | gaccttatgctcacacagccatcctctagtaagtttgtgagacgtctggtgacgtgtgggaacttact |
| | | ggaaacaatgctttgccgtaaggctttcattagccagcggaccaccacctggtaacaggtgcctct |
| | | ggggccaaaagccaaggtttaatagaccctaatggaatggttcaaacctggagcattgtggaaagt |
| | | acttagtacctgctgatctggtagtaatgcaaacactagttgtacggcccacgaaggatgcccaga |
| | | aggtacccgtaggtaacaagtgacactatggatctgatctggggccaactacctctatcttggtgag |
| | | ttggttaaaaaacgtctagtgggccaaacccaggggggatccctggtttccttttattttactttgtcaa |
| | | t |
| 476 | Parechovirus A17 | ctctattagtgagataccacgcttgtggaccttatgctcacacagccatcctctagtaagtttgtaaga |
| | | cgtctggtgacgtgtgggaacttgtgggaatcaatattttgctttaaagcatccattagccagcggat |
| | | aaaacacctggtaacaggtgcctctggggccaaaagccaaggtttaacagaccctagtggattgg |
| | | tttcaaaacctgaaatattgtggaacacactcagtacctactgatctggtagtaatgcaagcactagtt |
| | | gtaaggcccacgaaggatgcccagaaggtacctgtagggaacaagagacactatagatctgatct |
| | | ggggctggctacctctattttggtgagtcagttaaaaaacgtctagtgggccaaacccagggggga |
| | | ccctggtttccatttattttacaaaggcact |
| 477 | Potamipivirus A | cacatggaaagcttttcgcttccatgtttacgcacacactctctttgacaccctgttgtatggtgttaaa |
| | | ctacaacatttgtctgtctataatcgtttattttgtttaccctatatgtacccaagtatttgattgcttgactc |
| | | acataagcatcggtaacccatactgttttatgagctactacctctgctgtctacatacattttatatgaat |
| | | ggtttgagctctgcctcaggatcaaacatggtaacatgttcctttggtcagttagaatcttattgtataat |
| | | ctaaggtgtctattagtacgtagaaagttgtaacacatatggggcctgatagccgctatctctgatgg |
| | | atgtaaggtaaccttctttaggtctgatacattctgcacaggatccaattttcggtgccctgtacgagt |
| | | gcactcttatgcacgaggacgagatatgctacaacccactgcaaatttaaacccaaactttaaca |
| 478 | Potamipivirus B | tttcaacgtcgtggctgacgttaaaaagccacaattccacttaccttttaccttttatgtttaatgtttgtta |
| | | gttttgtgatctttaacaaatagatctaaataatttgttggtaaccaatctcggatgtttcggctgcattgt |
| | | agtttatttatttcattttagttgtaggtggccactacgtcctggaatcatacatggtaacatgtacctcg |
| | | gcggttatccactattacgctaatctaagaatatttaaatgaaaatgtaagtgttacggctgactttgg |
| | | gcctgatagttaaatgctcgcactgacagatagtaccctcctttaggatcgattctgttacatgggatc |
| | | cattttggtgccccactgattcaacctctttgttgaaaaagagttagcatactacaaattttccaaacaa |
| | | aaaccctttttaatgactacaacttatgattttatgaattttactgctcttgaaaaagatattttgacattga |
| | | tcgctgtactgtttcagacattcattgcatccatttttgttggctactcctcacaaactcaaaacttttcca |
| | | cacgagaaaccttgtttattgaattttgcctttatattttggaacttgttgttggatttattgtttgcttaatta |
| | | ttgacctcacacctgttttaaacactacaat |
| 479 | Beihai Conger | gggacaaccccacagctggtacaaccattgtgggttggtctccaccctttttcaaccgtggcaactt |
| | Picornavirus | cggttaaagttgcaaatcccccctctccctattccacctcccttactttcactccccatatatggtccca |
| | | gattttattctacctctttatatttttatttagtacagtggtggtgaattactcccagcataaactttgctgg |
| | | atcagtgttcatcaagcatactaattactaatgtactgagctatactattatctggcatctcacctggat |
| | | aaccggtgtgaccatatttcctaggttgcctccctatgtattttgtagcacctgtgcatctgcacgttgg |
| | | ggcgacaaattgtaggtttcctggcacgggtaagaattgtggaaagctagtatgcagttaatgcaa |
| | | gggcgcgtttttcgctaccccgacactgctaaagtttttgggaggggtcccttaaacatttctagtatt |
| | | gagtgatagctttgcggcaggtcaccacaaccttactataaataaacctgttgaatctcac |
| 480 | Porcine | tacgcatgtattccacactcatttcccccctccacccttaaggtggttgtatccccataccttaccctcc |
| | Sapelovirus | cttccacaatggacggacaaatggatttgacctcacggcaaacacatatggtatgatttcggataca |
| | JD2011 | ccttaacggcagtagcgtggcgagctatggaaaaatcgcaattgtcgatagccatgttagtgacgc |
| | | gcttcggcgtgctcctttggtgattcggcgactggttacaggagagtaggcagtgagctatgggca |
| | | aacctctacagtattacttagagggaatgtgcaattgagacttgacgagcgtctcctcggagatgtg |
| | | gcgcatgctcttggcattaccatagtgagcttccaggttgggaaacctggactgggcctatactacc |
| | | tgatagggtcgcggctggccgcctgtaactagtatagtcagttgaaaccccccc |
| 481 | Porcine | ttgaaatgggtgtggggtacatgcgtattacggtacgcatatattccacactcatttccccccctcca |
| | Sapelovirus A2 | cccttaaggtggttgtatccccataccttaccctcccttctaaaacagatggacaaatggatttgaact |
| | | tatggcaagtgaatatggtatgactttggatacactttaacggcagtagcgtggcgagctatggaaa |
| | | aatcgcaattgtcgatagccatgttagtgacgcgcttcggcgtgctcctttggtgattcggcgactgg |
| | | ttacaggagagtaggcagtgagctatgggcaaacctctacagtattacttagagggaatgtgcaatt |
| | | gagacttgacgagcgtctcttagagatgtggcgcatgctcttggcattaccatagtgagcttccagg |
| | | ttgggaaacctggactgggcctatactacctgatagggtcgcggctggccgcctgtaactagtata |
| | | gtcagttgaaacccccc |
| 482 | Simian | ccaaggatctgttgcataggcgttgtatcccctaaccttttacctacccatcccaataggactggtatt |
| | Sapelovirus 1 | tcggttttgattgagtaatggatactgattctatacctgttacccattcaggggaaaaatggagtttcttt |
| | | catggatctgacttgatatgaccaagagtcaacactttgcgtgttggccgtatggaatgctttaaggtt |
| | | tattctttggattatgacttcagggttggccgcccaggataaaaggcaattgtggtaagtgatgttagt |
| | | cattggtggttgaaacctgcctaagacgtcctaggtctacgctgtgcgggccgaagtaagcttagg |
| | | aataacagggagtatgccattttctgctttcacccaacacgaccgtacacgaaagagctagaggca |
| | | ctttggggcaaagggaaaagctttgcttagcccgaatgttcatttgagtccttgacgaatgcgtccc |
| | | gtctgtcccgacggtgaggcgtatggcgcatgctcatggcattacccaatggtgtatctgtgaggg |
| | | gggggctcctcacacttagtctagtgctacctgacagggccgcggctggtcgtttgtgtatggtata |
| | | accagtagtaatcccccatggattgctttaacttcccctcctcccttaccaagacattctctaag |
| 483 | Simian | ttttaacttgttatgacattcaaggaaaaaatgtctttttcattatgggactgacctgtttatgaacatgag |
| | Sapelovirus 2 | cagcggcactgctccacgggctatccgtgtaagaaatattgattattcttatggatcatgatttcagg |
| | | gttggccgcccagtctaaaaggcaattgtggtaagctatgtaagtagttggctgttgaaaggagcc |
| | | aagtacatcctaggtctacgctgtgcgggccgaagtaagacttggaacaactctgagtaggcagtt |
| | | tttctctttagcccaacacgaccgcatactgaagagctagaggcactttggggcaaaggtaaaagc |
| | | attgcttagaccgaatgttcaatgagaccttgacgagtgctgtcacagtgtcccctgatggcagtatg |
| | | gcgcatgctcttggcattacccatatgtgtatctatagggggggggccccctatacttagtctagtgc |
| | | tacctgacagggccgcggctggtcgtcggtgtgtggtataaccagtagtaatcccccatggattgc |
| | | tttaactccccctcctccctcaacaaaactttctctaag |
| 484 | Rabovirus C | ccgggtataacccggagttttggggcaggtccaagccccacataggaacatacgatccacggatc |
| | | gtgtgttcttttatgctttctaaccttaccctttgtaaccattacgctttacgccgcatggtgtttggcggc |
| | | accatgacgtggacaagaggttacgccattacgatatgtaccctccccttttggggagagaccgac |
| | | caattatggtacagtatccaactgtattgtggtcaagtacttctgtttccccggtgatgcgggataggc |
| | | tgtacccacggccaaaacctgctgatccgttacccgactcacatctacgaggaggctagtaaaag |
| | | gcatgaagttcaagagtatgatccaaccagatccccactggtaaactagtgatgagggttcccgttc |
| | | cgaacatggcaacatgtgggttccctgcgttggcactaggccccttccgaggggtgctctgaagat |
| | | ggattgttgatgaagaccaatttgtgcatgtgtttatcctccggccctctga |
| 485 | Rabovirus A | ccgaccccactggtcgaaggccacttggcaataagactggtggaacaaggtcgcctgtagttgatt |
| | NYC-B10 | ggaaccttctttctaatgacttatgtcagcggtgctactcacaccgtaactctcctaccctatccccac |
| | | gcttgtggaactaggaggggatgagtgattcaagtaagtactgtcagaatggtgaaaataatctgat |
| | | tctgaaacgctatggatccatcgaaagatggggctacacgcctgcggaacaacacatggtaacat |
| | | gtgccccaggggccgaaagccacggtgataggatcacccgtgtagtttgagatcatatcaatgttc |
| | | atagtctagtaagatgatttgaaatctaactggtctgatggctaactgcttgtcttattgcggcctaagg |
| | | atgtcctgcaggtacctttagagaaccttaagagactattgatctgagcaggagccaaggtggtcttt |
| | | cccagccttggttaaaaagcgtctaagccgcggcaggggggggaggccccctttcctcccaaa |
| | | ctataatatagattgt |
| 486 | Parabovirus C | gatgtatccccatcccccagtgtgtatgccatactgcatagctcgcctatgccctatggattcacaac |
| | | cctttcatataccctccctacccaaccccgtaaccacatgctttactccgcttggggttttgggcccc |
| | | atgttgtgacgaaatggctacgcaatcaatgcggctaatggggcctgccgcttttaagtggcccca |
| | | gttagaagtttatgcacacccgcccattaggaggccaccagccaggtggtcagagggcaagcac |
| | | ttctgtttccccggtgaagtttgataagctgtgcccacggctgaagcagacagatccgttacccgcc |
| | | tcactactacgagacggctagtagtgtgtaatatccgaatttcattgatccgggtgttccccccaccc |
| | | agaaacgtgtgatgaggagcggcacccctcctatggcaacatagggcctctcctgcgctggcac |
| | | acgggctctatgagcatgaaatcaggagaaagtcacacgaagaccttattgtgctagtgttgattcc |
| | | tccgcccccctgaatgcggctaatcccaactccggagcgcccgctggcaaacccgccagaaga |
| | | gcgtcgtaatgcgtaagtctggagcggaaccgactactttgggtgtggcgtgtttcctttatttccttt |
| | | gtatttgtat |
| 487 | Parabovirus B | aacccataatccattgtccatcaatgttttatgggggggaccctttctcccctccccctccaaatacct |
| | | tttacccctctgtaaccaagagtgtgcaaaatctatttactagcccagaattgcggcttctggggagg |
| | | tttattcctcatgcctaacaagatgttacgcaaactccgggctacggccctgggcttttgccctaaag |
| | | atttagaagtttacactatcgtccaacaggaggacaacaaaccagttgttctaaggacaagcacttct |
| | | gtttccccggtgagactggatagactgtacccacggttgaaactggttgatccgttacccgactcac |
| | | tacttcgagaagattagtaggaaactgtgaaactgattccattgatccggatactttccccgtatcca |
| | | gaaactactgatgagggttgacttcccgactacggcgacgtagtgtcatccctgcgctggcagtag |
| | | gcctctttgaggatggaagatgtggatcggtaaccgaaggtcctattgagctagtgtttatacctccg |
| | | gcctcctgaatgcggctaatcctaacccatgatctagtgctcacaaaccagtgagtagctagtcgta |
| | | acgcgtaagtcgtgggcggaaccgactactttggagtgaccgtgtttcctattttacttttgtttg |
| 488 | Parabovirus A3 | accgttacgcaccactcagttggtgtttggtggcaccaatgatggaacaaaaggctacaccacttg |
| | | ggctacggcccgcgccaccttgtggcgcaaagacattagaagaatagcataccgcccactaggg |
| | | ccctgcagccagcagggtaacgggcaagcacttctgtctccccggtagaacggtataggctgtac |
| | | ccacggccgaaaactgaactatcgttacccgactccgtacttcgcaaagcttagtaggaaactgga |
| | | aagttcgagttattgacccggagtgttccccccactccagaaacgcgtgatgagggttgccacccc |
| | | gaccatggcgacatggtgggcatccctgcgctggcacgcggcctctaagaggataactcgctcct |
| | | actggtaaccgaagagccccgtgagctacggtttattcctccgcctccctgaatgcggctaatccta |
| | | acccatgagcagttgccatagatccatatggtggactgtcgtaacgcgtaagttgtgggcggaacc |
| | | gactactttgggatggcgtgtttccttgttttctccatttgttgttgtatggtgacaagttatagatctcga |
| | | tctatagcgtttcttgagagatttccaaacatttattcaagtcgtacaattcttgtgtttaagcagtacagt |
| | | gtaagg |
| 489 | Felipivirus 127F | gatgtcggatgacggctggccaccggggaaaaacggcaaatgtgcaccacctctgcaacccac |
| | | gccgaccacgtttaaccatggcgttagtaggagtggaccactgcagtgggctctggtgtgcgaca |
| | | gtcagtggtagagtagacagtcctgactgggcaatgggaccgcgttgcgtatccctaggtggcat |
| | | cgagattcctctgctacccaccagcgtggactcctatggggggggccccataggctaggtctatac |
| | | tgcctgatagggtcgcggctggtcgaccactgactgtataaccagttgtaactcact |
| 490 | Boosepivirus A | ttgaaagacctcggcatatatcgttgtcacaacggtatatgtcgagatctttctccccaccccctcca |
| | | attcccttttccccctcttgcaacttagaagtttgtacacacagggcaataggatacgtgatccagcc |
| | | aggacacgtgagctcaagcacttctgtttccccgtccccttcacgtactacgggaatgttagtaattt |
| | | gtgtgcactttagtaaggttgatccgggattaaccccaaatcccagaaactggtgatgagcgttacc |
| | | acccccgccgggcgaccggaaggtttcgctgcgttggcaccagggcttcggcaccagaaaaag |
| | | gtaaagcaaatgaaggcgctactgtgctacgagaagtttcctccaggcccctgaatgcggctaatc |
| | | ctaaccagtgatccaccggtgcaaaaccatgtactaggtggtcgtaacgcgcaagtcgctggcgg |
| | | aaccgactactttgggtgtcctgtgtttccatattttattttattcaattttatggtgacaagagtaaagag |
| | | atacagatttgcagcc |
| 491 | Boosepivirus B | ttttctcccctccccctccaactaccttttccccctcttgtaacgctagaagtttgtgcaaaccgcctgt |
| | | agggtactgcaatccagcagtgcataggctaagcttttcttgttaccccaccccacattatactgagg |
| | | aggattgtgaaattgtgttagtatgggttagtagcggtgacccgggtaaccccaacccagaaactc |
| | | acggatgagatgaacaggaccccacatggtaacgtgtgtgttcgtctgccccgcaaggtgaggcc |
| | | gtgagagctttgcacgcgaaaaccttgaaaacccaaaagtaccttgagctcttcgctattttgtgtttc |
| | | ctccaggaccctgaatgcggctaaacctaacccgcgatccgcacgtagcaacccagctagagtgt |
| | | ggtcgtaatgcgcaagttgcgggcggtaccgactactttggtgttcctgtgtttcctttattttattttga |
| | | atttttatggtgacaacagctagaaaataagagtgaac |
| 492 | Phacovirus Pf- | gtgtgtcatttctcccctccccctcccaaaccttttccccctctaatcggattgattaacccggttaaag |
| | CHK1 | atgattaatggtttgtgagttgatatgatggcccggcattgaatccgggaattcttaagtaatggaatt |
| | | gcatccaatatgaaagtgagtgtggcaagctcacaagtagtacttggctctgcccattatttgagga |
| | | ccaactcttcttgactacaatgtgtttaaagtaaactggaccacattgtgtatccagacaactccatttg |
| | | ataatgtacgctggaaacgttttcagtgcatagggtcctaaagtggtgctgaaatattgcaagctcaa |
| | | tgggatactgaacgctgaaaaccgccgctgttatcatatgggcccctagtgggtaaatgttggcttt |
| | | aggcatatactgcttgggaatgcagtactggttgtagacagggtgatagcctaccggctggcgtag |
| | | ttgagttggtatagccagttgattgccat |
| 493 | HRVC3 QPM | ttaaagctggatcatggttgttcccaccatgattacccacgcggtgcagtggtcttgtattacggtac |
| | | atttccataccagttttatacaccccaccccgaaactcatagaagtttgtacacaatgaccaataggt |
| | | ggtggccatccaggtcgctaatggtcaagcacttctgtttccccggcacccttgtatacgcttcaccc |
| | | gaggcgaaaaatgaggttgtcgttatccgcaaagtgcctacgaaaagcctagtaacactttgaaaa |
| | | cccatggttggtcgctcagctgtttacccaacagtagacctggcagatgaggctagacattcccca |
| | | ccagcgatggtggtctagcctgcgtggctgcctgcacaccctgccgggtgtgaagccagaaagt |
| | | ggacaaggtgtgaagagcctattgtgctcactttgagtcctccggcccctgaatgtggctaacccta |
| | | accccgtagctgttgcatgtaacccaacatgtatgcagtcgtaatgggcaactatgggatgggacc |
| | | aactactttgggtgtccgtgtttcctgttttactttttcattgcttatggtgacaattgtatctgatacacttg |
| | | ttacc |
| 494 | HRVB27 | ttaaaacagcggatgggtatcccaccatccgacccacagggtgtagtgctctggtattttgtaccttt |
| | | gcacgcctgtttccccattgtacccctccttaaatttcctccccaagtaacgttagaagtttaaggaaa |
| | | caaatgtacaataggaagcatcacatccagtggtgttatgtacaagcacttctgtttccccggagcg |
| | | aggtataagtggtacccaccgccgaaagcctttaaccgttatccgccaatcaactacgtaatggcta |
| | | gtattaccatgtttgtgacttggtgttcgatcaggtggttccccccactagtttggtcgatgaggctag |
| | | gaactccccacgggtgaccgtgtcctagcctgcgtggcggccaacccagcttttgctgggacgcc |
| | | tttttacagacatggtgtgaagacctgcatgtgcttgattgtgagtcctccggcccctgaatgcggct |
| | | aaccttaaccccggagccttgcaacataatccaatgttgttgaggtcgtaatgagtaattctgggatg |
| | | ggaccgactactttgggtgtccgtgtttccttttattctttatattgtcttatggtcacagcatatatagcat |
| | | atatactgtgatc |
| 495 | HRVA73 | ttaaaactgggtttgggttgttcccacccaaaccacccacgcggtgttgtacactgttattccggtaa |
| | | ccttgtacgccagttttatatcccttcccccccttgtaacttagaagacatgcgaatcgaccaatagca |
| | | ggcaatcaaccagattgtcaccggtcaagcacttctgtttccccggctctcgttgatatgctccaaca |
| | | gggcaaaaacaattggagtcgttacccgcaagatgcctacgcaaaacctagtagcatcttcgaag |
| | | atttttggttggtcgctcagttgctaccccagcaatagacctggcagatgaggctagaaatacccca |
| | | ctggtgacagtgttctagcctgcgtggctgcctgcacacccacacgggtgtgaagccaaagattg |
| | | gacaaggtgtgaagagtcacgtgtgctcatcttgagtcctccggcccctgaatgcggctaacctta |
| | | accccgtagccattgctcgcaatccagcgagtatatggtcgtaatgagtaattacgggatgggacc |
| | | gactactttgggtgtccgtgtttcactttttacttatcaatttgcttatggtgacaatatatatagatatatat |
| | | tgacacc |
| 496 | EVL | acatgggccagcccaccacacccactgggtgtagtagtctggttctatggaacctttctacgcctctt |
| | | ttgcttccctcccccatttctccttcgattgctccacctgtgatctttgcaacttagaagaaataatgaac |
| | | ccgcacaatagcgggcgctgagccacagcgtcaatgtgcaagcacttctgtttccccggaatggg |
| | | cccataggctgtacccacggctgaaagggaccggcccgttacccgccttggtactgcgagaatgt |
| | | tagtaactccctcgatagctttaggcgttacgctcagccctttgagcccgaagggtagttcgggtcg |
| | | atgaggctcgtcattccccactggcgacagtgtgacttgcctgcgttggcggcccggggtggggg |
| | | gcaacccccatccacgcctactgaaggacagggtgtgaaggcgctattgcgctactaaggagtcc |
| | | tccggcccctgaatgcggctaacccgaaccccgagcccacggtggtaaacccgccacaagtgg |
| | | gtcgtaatgagtaatttggggcagggaccgactactttgggtgtccgtgtttcctgtttttccatacgat |
| | | ggctgcttatggtgacaaccataagcaattggattggccatccggtgttcatattgcgaat |
| 497 | EV K | tcagcctgacgcaagtgcctccattggagtctctccaagccctccggggcttggagggcgccgac |
| | | cccctgcctagggggagcccacgacacggctggagtccattggcacaccgcagccacgattca |
| | | agccagaattgaaagcgggaagcacttctgtctccccggtgtggatcatacgctgtacccacggc |
| | | gaaaagtgaagcatcgttacccgactcggtacttcgagaagcccagtacagttgtggatctctgca |
| | | gggtatacgctcagcgtgacccctacgtagttccttgagatggctgagagaacaccccacgggcg |
| | | accgtgtctctcggcgcgtggctcaaggccgggccttcagtggctcggtgccttgcagagtgaag |
| | | cctccgaacagcctattgagctaccgtttagcctccgccctcttgaatgcggctaatcctaaccatg |
| | | gagcgcccgcccacagtccagtgggtagagcgtcgtaacgcgcaagtccgtggcggaaccgac |
| | | tactttagagtggcgtgtttccaatttatcctttataaagttgcttatggtgacaccacaagagatccac |
| | | gatttcttgtttcttatcactgagacacaagtcatattcatcaatctttattgcggaattaacttggtgcgt |
| | | ccaaacacatcagc |
| 498 | EV J 1631 | caccctgagggcccacgtggcgtagtactctggtatcaaggtacctttgtacgcctattttatttccct |
| | | tcccccacagtaacttagaagcttatctcatagttcaacagtagggtcactaaccaagtggctcagc |
| | | gaacaagcacttctgtttccccggtcctagtacctgtgaagctgtacccacggcggaaggggaaa |
| | | aagatcgttatccggccccctacttcggaaagcctagtaacaccattgaagcaatcgagtgttgcg |
| | | ctcagcacagtaacccctgtgtagctttggttgatgagtctgggcactccccactggcgacagcgg |
| | | cccaggctgcgttggcggccaaccgactcgggcaaccgggtcggacgctcgtttgtggacatgg |
| | | tgtgaagagcctactgagctagagggtagtcctccggcccctgaatgcggataatcctaaccccg |
| | | gagcacccacactcaatccagagtgcaggatgtcgtaacgcgtaagtctgggacggaaccgact |
| | | actttgggtgtccgtgtttcctgttttacttactttggctgcttatggtgacaatctagtgttgttaccatat |
| | | agctattggattggccatccggtgttttgaattgtgtgtttatactaattcttttacatatcacagacaacc |
| | | aaat |
| 499 | EV J N125 | cggtacctttgtacgcctattttacccccttccccttgtaacttagaagcaaagcaaaccagttcaata |
| | | gtaagcaacacaacccagtgttgtgacgaacaagtacttctgtttccccgggagggtctgacggta |
| | | agctgtacccacggctgaagtatgacctaccgttaaccggctacctacttcgagaagtctagtaata |
| | | ccattgaagttttgttggcgttacgctcaacacactaccccgtgtgtagttttggctgatgagtcacgg |
| | | cattccccacgggcgaccgtggccgtggctgcgttgcggccaaccaaggggcgcaagctccttg |
| | | gacgtcacttaacagacatggtgtgaagaacctattgagctaggtagtagtcctccggcccctgaat |
| | | gcggctaatcctaactccggagcacatcagtgcaacccagcatttggtgtgttgtaatacgcaagtc |
| | | tggagcggaaccgactactttgggtgtccgtgtttcctgttttaccttatttggctgcttatggtgacaa |
| | | tttgatattgttaccatatagctgttggattggccatccggatttttgaaagagacccaaaactttcttct |
| | | ctacttcagattcaagtgcgaagttttccttttcatatattacttactaatttgaagtaccaaag |
| 500 | EV I | ttagtactttctcacggggatagtggtatccctccctagtaatttagaagacttgaaaaaccgaccaat |
| | | aggcacctcgcatccagcggggtaaaggtcaagcacttctgtttccccgggtcgagtagcgatag |
| | | actgtgcccacggtcgaaggtgaaacaacccgttatccgactttgtacttcgggaagcctagtacc |
| | | accaaagattatgcttggggtttcgctcagcacgaccctggtgtagatcaggccgatggatcaccg |
| | | cattcctcacaggcgactgtggcggtggtcgcgtggcagcctgccgatggggcaacccatcgga |
| | | cgccaagcatatgacagggtgtgaagagcctactgagctacaaagtattcctccggcccctgaat |
| | | gcggctaatcccaaccacggagcatttgctaccaaaccaggtagtggaatgtcgtaacgggtaac |
| | | tctgtggcggaaccgactactttgggtgtccgtgtttccttttaatttatcattctgtatatggtgacaact |
| | | atagtgctatctcgatttgcattactattgttgagattaaaactttattacattgttgcattttaccctttgag |
| | | tgagttttcacctgaacagattaatttactcatcctgtttatatattacaagcagaaatacttgcaaag |
| 501 | EV F1 BEV 261 | gcaatgctgcaccagtgcactggtacgctagtaccttttcacggagtagatggtatcccttaccccg |
| | | gaacctagaagattgcacacaaaccgaccaataggcgcaccgcatccagccgtgcagcggtca |
| | | agcacttctgtctccccggtctgtaaagatcgttatccgcccgacccactacgaaaagcctagtaac |
| | | tggccaagtgaacgcgaagttgcgctccgccacaaccccagtggtagctctggaagatggggct |
| | | cgcaccacccccgtggtaacacggttgcctgcccgcgtgtgcttccgggttcggtctcgtgccgtt |
| | | cacttcaacttcacgcaaccagccaagagcctattgtgctgggacggttttcctccggggccgtga |
| | | atgctgctaatcccaacctccgagcgtgtgcgcacaatccagtgttgctacgtcgtaacgcgtaagt |
| | | tggaggcggaacagactactttcggtaccccgtgtttcctctcattttatttaatattttatggtgacaat |
| | | tgttgagatttgcgctcttgcaacgttgccattgaatattggcttatactatttggttgccttttacaaaac |
| | | ctctgatatacccagttcttacattgatctgcttgtttttctcaatttgaagtatagactacaaatagcaaa |
| 502 | EV D94 | cgtggcggccagtactctggtatcacggtacctttgtacgcctgttttatatccccttcccccgcaact |
| | | tagaagaaaacaaatcaagttcactaggagggggtacaaaccagtaccaccacgaacaagcact |
| | | tctgtttccccggtgatgtcgtatagactgtaaccacggttgaaaacgattgatccgttatccgctctt |
| | | gtacttcgaaaagcccagtatcaccttggaatcttcgatgcgttgcgctcagcactcaaccccagag |
| | | tgtagcttaggtcgatgagtctggacactcctcaccggcgacggtggtccaggctgcgttggcgg |
| | | cctacctgtggtccaaagccacaggacgctagttgtgaacaaggtgtgaagagcctattgagctac |
| | | aagagaatcctccggcccctgaatgcggctaatcctaaccacggagcaagggtacacaaaccag |
| | | tgtatatcttgtcgtaacgcgcaagtctgtggcggaaccgactactttgggtgtccgtgtttccttttgt |
| | | ttttatcatggctgcttatggtgacaatctaagattgttatcatatagctgttggattggccatccggtaa |
| | | tttattgagatttgagcatttgcttgtttcttcaacaatttcacctattcattgcatttcagcagtcaaa |
| 503 | PV3 | tacctttgtacgcctgttttatactccctcccccgcaacttagaagcatacaattcaagctcaatagga |
| | | gggggtgcaagccagcgcctccgtgggcaagcactactgtttccccggtgaggccgcatagact |
| | | gttcccacggttgaaagtggccgatccgttatccgctcatgtacttcgagaagcctagtatcgctctg |
| | | gaatcttcgacgcgttgcgctcagcactcaaccccggagtgtagcttgggccgatgagtctggac |
| | | agtccccactggcgacagtggtccaggctgcgctggcggcccacctgtggcccaaagccacgg |
| | | gacgctagttgtgaacagggtgtgaagagcctattgagctacatgagagtcctccggcccctgaat |
| | | gcggctaatcctaaccatggagcaggcagctgcaacccagcagccagcctgtcgtaacgcgcaa |
| | | gtccgtggcggaaccgactactttgggtgtccgtgtttccttttattcttgaatggctgcttatggtgac |
| | | aatcatagattgttatcataaagcgagttggattggccatccagtgtgaatcagattaattactcccttg |
| | | tttgttggatccactcccgaaacgttttactccttaacttattgaaattgtttgaagacaggatttcagtgt |
| | | caca |
| 504 | EV C102 | ctttgtacgcctgttttacatcccctcccccacgtaactttagaagcaattcaacaagttcaatagagg |
| | | gggtacaaaccagtatcaccacgaacaagcacttctgtttccccggtgattttacataagctgtgcc |
| | | cacggctgaaagtgaatgatccgttacccgctcgagtacttcgaaaagcctagtatcgctttgggat |
| | | cttcgacgcgttgcgctcagcactctaccccgagtgtagcttaggctgatgagtctgggcattcccc |
| | | atcggcgacgatggcccaggctgcgttggcggcctacccatggctaacgccatgggacgctagt |
| | | tgtgaacaaggtgtgaagagcctattgagctactcgagagtcctccggcccctgaatgcggctaat |
| | | cccaaccacggatcaggtgcctccaacccaggaggtggcctgtcgtaacgcgcaagtctgtggc |
| | | ggaaccgactactttgggtgtccgtgtttccttttatcttttaaatggctgcttatggtgacaatcataga |
| | | ttgttatcataaagcgaattggattggccatccggtgaaatacaaacacattatttacttgtttgttggat |
| | | ttactccgctcacacagcttactcctaagataatatttattgtattgctggtaaggagacactattata |
| 505 | EV 30 | aagcaaggcaaacctgaccaatagtaggtgtggcacaccagccgcattttggtcaagcacttctgt |
| | | ttccccggaccgagtatcaataagctgctcacgcggctgaaggagaaaccgttcgttacccgacc |
| | | agctacttcgagaaacctagtaacactatgaacgttgcggagtgtttcgttcagcacttcccccgtgt |
| | | agatcaggtcgatgagtcaccgcattcctcacgggtgaccgtggcggtggctgcgttggcggcct |
| | | gcctacgggttcgcccgtaggacgctctaataccgacatggtgtgaagagtccattgagctagctg |
| | | gtagtcctccggcccctgaatgcggctaatcctaactgcggagcaggtgctcacagaccagtgag |
| | | tagcctgtcgtaacgggcaactctgcagcggaaccgactactttgggtgtttttccttttttcttctctta |
| | | tattggctgcttatggtgacaattaaagaattgttaccatatagctattggattggccatccggtgacg |
| | | agcagagccattgtttacctctttgttggatttgtacctttgaaccacaaagtcttgaataccattcatct |
| | | cattttaaagttcaactcagctaaaagaaa |
| 506 | SA5 | agtacttggtattccggtacctttgtacacctatttacaaaccctaccccttgtaaccttagaagcaatt |
| | | atttaaccgctcactagggggtgtgctatccaagcacatcaagagcaagcacttctgtctccccgg |
| | | gaggggctaatggtacgctgtgcccacggcggaaatgagccctaccgttaaccggcagtctactt |
| | | cgggaagcccagtaactacattgaaactttgaggcgttacactcagcacataaccccaatgtgtagt |
| | | tctggtcgatgagccttggcatcccccacaggcgactgtggccaaggctgcgttggcggccagc |
| | | ctgcggaccaaaagtccgtaggacgcctaattgtggacatggtgtgaagagcctactgagctaga |
| | | ctgtagtcctccggcccctgaatgcggctaatcctaaccctggagcatccgcgtgcaacccagtac |
| | | gtagggtgtcgtaatgcgtaagtctgggatggaaccgactactttgggtgtccgtgtttcttgtttttca |
| | | tactgggtcgcttatggttacaactaattgttgtaatcattggcagtgcgcgctgaccacgcgattatt |
| | | gatatttccatttgttggatactccaatagtgtcaactcatatacacaacttttaccactgatcaagataa |
| | | aa |
| 507 | EV A114 | tgtgcgcctgttttgaaaccccctcccccaactcgaaacgtagaagtaatgtacactactgatcagta |
| | | gcaggcgtggcgcaccagccatgtctcgatcaagcacttctgtttccccggactgagtatcaatag |
| | | actgctcacgcggttgaaggtgaaaacgtccgttacccggctaactacttcgagaaacctagtagc |
| | | accatagaaactgcagagtgtttcgctcagcacttcccccgtgtagatcaggtcgatgagtcactgc |
| | | aatccccacgggtgaccgtggcagtggctgcgttggcggcctgcctatggggcaacccatagga |
| | | cgctctaaggtggacatggtgtgaagagtctattgagctagttagtagtcctccggcccctgaatgc |
| | | ggctaatcctaactgtggagcgcatactcccaaaccagggagcagtgcgtcgtaacgggcaactc |
| | | cgcagcggaaccgactactttgggtgtccgtgtttccttttattcctatactggctgcttatggtgacaa |
| | | ttgagagattgttaccatatagctattggattggccatccagtgtgtaatagagcaatcatttaccaatt |
| | | tgttggatttactccattaacccacacgtctctcaacacactacatttcatcttactactgaacactaga |
| | | aa |
| 508 | Mobovirus A | tattctcccacaaaccttcttgtaactctgttaagccttttacatccatgtaatttaattttctccacctaaa |
| | | aggatttcccccatggtcctttttggctcgaacaaatgctacatagggtcttgttttctccccctggctc |
| | | tcttgccagggttccataccccaattcctctatttccatgatttttcatcatggtttatttttactgtcttctta |
| | | ttttctgaggtgaccaactcctaagccgactgggtcgcggaagcccggactcctcgcatcactagg |
| | | gtgcgtagcgatgtaggcgaaaatattggttgctagatgcatacatatagtgaattgatactacacca |
| | | aactctgttctttttgaaactagctattttctaagtaaggtaggctacgggtgaaaccttaccattgcag |
| | | gtacgtgaaccgcaacggacatttggccgaagactggtgtacccacgtcagttataggacctcttc |
| | | aacgttggtggacggcatgtcactgattagttaggctagtgaatttaagttcagggggtatcttttagc |
| | | ttaagcgtgtattctagtaggacttgcagagcctccccacctaggaggatctctgtttatagccccttt |
| | | tccttgttccgttagttttccacacttttacaatatttgatgatttgtt |
| 509 | Burpengary Virus | ctccccccccttccccttcccgagtaggagattggcatgtatgctctacatgcccgattctctcttgct |
| | | cactctcttaaatcctggtggcggtctcggattaaacatttatgtcgtatctgggatcgtcttacttggt |
| | | ggtaattcctctgttgcctagggacctccggactgccggattaaaggtctcaacagagggcaatgt |
| | | acaaggaagtcattatacgctaattaagtatttgatgaatgactagtgtgacagggctgaggaactc |
| | | cccccgggtaaccggtgcctcagcgtccgaaagacacgtggataggatccaccctgttataccca |
| | | gcacgatgtaatagtcaaatacctctgatttgtgtaggatgtataaattgtgcattgtaaattttgggcg |
| | | tagagatgctccgaaggtaccccgttttacgggatctgatcggaggctaattacccaatgcgcccta |
| | | aataacttcatataatttctttttctttattcaaa |
| 510 | Hunnivirus A1 | taacgtttggcaagaaccctcacctgtcaattgggaccaccactttcagtgaccccatgcgaagtag |
| | | tgagagagaataagctttcttacccttcatttgtgaacccttcagtcgaagccgcttggaataagata |
| | | ggaggaaaagttcattctaaatggagtgaaacatgtacttcagaatttctagcacgcgctgggctttc |
| | | ttgcgtgtgacggcactgtcttgccggagctctccacactgacaccccacgcttgtggaccttggtg |
| | | gcagatgacaacactgcagctggaattgagtgtctggtacactctgtgtaacagtgaaaacaatgt |
| | | gatcacttcggtgagctagtagcctgtggaccaacaactggtaacagttgcctcaggggccaaaa |
| | | gccacggtgtttacagcaccctactggtttgattggagcaatccaagatgtcacagagttagtaattg |
| | | ccaagcagtccgtactggtatcttgacataccgtgcagttttggatagtgaaggatgccctgacggt |
| | | acccataggtaacaagtgacactatggatctaagcaggggctcactctacgctgctttacagctgg |
| | | ctgtgagttaaaaaacgtctagctatccacaacctaggggactaggttttccttttatttagattacaatt |
| | | at |
| 511 | Hunnivirus A2 | acagtttttgacaaggaccctcacctgtcaatcgggaccaccactttcagtgaccccgtgcgaagt |
| | | gttgagagaaagtgagctttcttacccttcatttgtgaacccttcagtcgaagccgcttggaataagat |
| | | ggaaggaaatgttcattctaaatggagtgaaacatatacttaatttccagtgtttagtggtctttccact |
| | | agacaacggcactgtcttgccggaactctacacaccaacattccacgcttgtgggactcaaatgttg |
| | | gatgacacagttgtagctggaactgagtgtttagtgcactctgtgtaacagtgaaaacaatgtgatca |
| | | cttcggtgggctagtagcctgtggactaacaactggtaacagttgcctcaggggccaaaagccac |
| | | ggtgttaacagcaccctactagtttgattggagcaatccatgatgttacagagttagtaactgccaaa |
| | | cagattgtactggtatcttggcataccgtgcaacttaggatagtgaaggatgccctggcggtaccca |
| | | taggtaacaagtgacactatggatctaaacaggggctcactctacgttgctttacaactagctgtga |
| | | gttaaaaaacgtctaactatccacaacctaggggactaggttttcctttttatttttatacacaacta |
| 512 | Ia Io | ggtgtccgggtgtgtgggatagacccagatgtgcagtggatgcgagcatttgagtcagagtagga |
| | | gcaagcccaggggcaaagggaccacattgtgtatcccgaatgaaggatcgagatttctctcctcat |
| | | tacccggtgtcttgtcactgttgggggggcccaacagtcttagtcctatactgcctgatagggtcgc |
| | | ggctggccggactcaagtgctatagtcagttgattttcactc |
| 513 | Taura Syndrome | ctttaaaagtcgtgcgtggcttcaccacgcacgatcagtactatcagttaaccactcttgaatatgctc |
| | Virus | aatgaccctattcaacactggtgtctcttagtacattattttagcacttaacgtgcatgagttttgcccat |
| | | ttctttcaaaaaaatgagtattcgaggagacgtcccgctccccgtcttatttcaaccgtagactcgac |
| | | atctattggtggacatttaattccagtcgccgtaagttgcttctgccccgcgctatattttcttatacttat |
| | | ggttctataggtctggtttaaaacgtaaatagacggcccacaaactatagaacgcgtacccggaac |
| | | gccaatcccggataagtccctggatatatagatgcaccgcaatataagcctgcagactgtctcatat |
| | | act |
| 514 | ABPV | cccgtcaaaataacaacttataacacgatgttacccgaagaaaccattttagtgtaacatttaagatta |
| | | gaagtagttcatctaatagagataggcactattagaaggaggccttttctaaaggagccgttagtca |
| | | gcccagacaagcgcagtactttagaagagagaagttccccgatagcgaccgaaaagacgcgtttt |
| | | ccgtgctaactaatttaaatgtgggaacgaatattattattgaaattatgtgagccacgtagcaatcaa |
| | | gtcatgtttttgtcactacgtttactcatctaatgtagataattttgtttaagtacctatttaggtgtcatccc |
| | | accagagaagaaataatacgtaccggaacccagagtacaccccttattttaagccttactgggcttc |
| | | tctgttagttagtaatctggcccacgttttgcgttgagtggggtcccaacagtaggaattcgacggac |
| | | aagtagcaagcgagtcggtaccaattggtttagccttcgaaattactctgggcaggaagttactaaa |
| | | cgagaactttctgcttaaatcccaacgcacaaacaaatagagtaaataaataattata |
| 515 | BRAV-2 | tttgttttgcggctttgccgttgttcgggttttacctgttttcacacagcaaaacaggccttctagtttcgt |
| | | gcttaaacgagatcatgctcgaactagaactacatagctggtcactggactcataccacaccttgtg |
| | | gagctttatgggaaaggtggctagtgggctgtggaagtgactctgaccacatgcctctcaagtgtg |
| | | ggaaatcacggatcggtgtagcgacgacaacaggccttgggacaccctctccagtaatggagac |
| | | ccaaggggccaaaagccacgcctcgtgccctgttgttcacaaccccagtgcgacccgtgttagta |
| | | cctatttgcgagaactgtgtctggacagctaaacacaaccctagtgggagactaaggatgcccag |
| | | gaggtacccggaggtaacaagtgacactctggatctgacctggggagagagggcttgctttacag |
| | | gcgcctctctttaaaaagcttctatgtctcatcaggcaccggaggccgggccttttccttttaaaatta |
| | | cactta |
| 516 | BRBV-1 | ccccccctacttaaagatgtacggttttgctgctttcacagagtaaagcagatagaggttctgaactg |
| | | gcaaactttacctcgaaacacgcccgtttttctgctgtgtctcacagactgtcctgtcacacttgtggc |
| | | ggcttgtgacactgtgaacatagtgagaccgaccaagacaacagtttcaagtgatgaacatcgaac |
| | | gtctaaactggatccgtaactggacatgttagggcaaggacttcccccctggtaacaggagcctgg |
| | | ctggccaaaagccccgctcattgagcctagcatgttgtcgaccctggactgttcagtttagttagtac |
| | | atggaattcacttgtcacggttcttctgaactcggtctctagtatgacagcctaaggatgccctccag |
| | | gtaccccggggtaacaagtgacacccgggatctgaggaggggactactttacgtagtttaaaaaa |
| | | cgtctaagctgttatggtgaccagaggctggcacctttcacttttaaaattacactactgactacaatt |
| | | gaagtgataacggttttacaggctttcaaactagttacacaagcactgttttcctgacacacacacttt |
| 517 | ERAV-1 U188 | aatattggcgcgcgcatttgcgcgcccccccccatttcagccccctgtcattgactggtcgaaggc |
| | | gttcgcaataagactggtcgtcacttggctgttctatcgtttcaggctttagcgcgccctcgcgcggc |
| | | gggccgtcaagcccgtgcgctgtatagcgccaggtaaccggacagcggcttgctggattttcccg |
| | | gtgccattgctctggatggtgtcaccaagctgacaaatgcggactgaacctcacaaagcgacaca |
| | | cctgtggtagcgctgcccaaaagggagcggaactcccccgccgcgaggcggtcctctctggcc |
| | | aaaagcccagcgttaatagcgccttttgggatgcaggagccccacctgccaggtgtgaagtggag |
| | | tgagtggatctccaatttggtctgttctgaactacaccatctactgctgtgaagaatgccctggaggc |
| | | aagctggttacagccctgaccaggggccctgcccgtgactctcgatcggcgcagggtcaaaaatt |
| | | gtctaagcagcagcaggaacgcgggagcgtttcttttccctttgtatcgac |
| 518 | GFTV | atggggaagggtatgacgtgccccttccttcttcggagaactcgctctagtggtctttccacttctgg |
| | | aaaagagtgagtgcacgtgatcaggaccgtcgaagacgacaaatacctggtgctctatctcatag |
| | | acgtttcacagctgtagcgacccctcagtagcagcggaagccccctcctggtgacaggagcctct |
| | | gcggccaaaagccacgtggataagatccactgctgagggcggtgcgaccctagcaccctgtgat |
| | | gcatactagttgtagcgtgccggactattggtctgtcataagacacctgatagagagaccaagaat |
| | | gtcctggaggtaccccgcgtgcgggatctgaccaggagaccattgcccaatgctttacaacgggt |
| | | ctatggtttaaaaactgtcgcagtctctccaaaccaagtggtcttggttttcaattactttgaatatttca |
| | | ct |
| 519 | SAFV V13C | ttttcgacgtggttggaattgccatcatttccgacgaaagtgctatcatgcctccccgattatgtgatgt |
| | | tttctgccctgctgggcggagcattctcgggttgagaaaccttgaatctttttctttggaaccttggttc |
| | | ccccggtctaagccgcttggaatatgacagggttattttcttgatcttatttctacttttgcgggttctatc |
| | | cgtaaaaagggtacgtgctgccccttccttctctggagaattcacacggcggtctttccgtctctcaa |
| | | caagtgtgaatgcagcatgccggaaacggtgaagaaaacagttttctgtggaaatttagagtgcac |
| | | atcgaaacagctgtagcgacctcacagtagcagcggactcccctcttggcgacaagagcctctgc |
| | | ggccaaaagccccgtggataagatccactgctgtgagcggtgcaaccccagcaccctggttcgat |
| | | gatcattctctatggaaccagaaaatggttttctcaagccctccggtagagaagccaagaatgtcct |
| | | gaaggtaccccgcgtgcgggatctgatcaggagaccaattggcggtgctttacactgtcactttgg |
| | | tttaaaaattgtcacagcttctccaaaccaagtggtcttggttttccaattttgttgaatggcaat |
| 520 | SAV P-113 | ggagatctaagtcaaccgactccgacgaaactaccatcatgcctccccgattatgtgatgctttctg |
| | | ccctgctgggtggagcatcctcgggttgagaaaaccttcttcctttttccttggaccccggtcccccg |
| | | gtctaagccgcttggaataagacagggttatcttcacctcttccttcttctacttcatagtgttctatact |
| | | atgaaagggtatgtgtcgccccttccttctttggagaacacgcgcggcggtctttccgtctctcgaaa |
| | | agcgcgtgtgcgacatgcagagaaccgtgaagaaagcagtttgcggactagctttagtgcccaca |
| | | agaaaacagctgtagcgaccacacaaaggcagcggaccccccctcctggcaacaggagcctct |
| | | gcggccaaaagccacgtggataagatccacctttgtgtgcggcacaaccccagtgccctggtttct |
| | | tggtgacacttcagtgaaaacgcaaatggcgatctgaagcgcctctgtaggaaagccaagaatgt |
| | | ccaggaggtaccccttccctcgggaagggatctgacctggagacacatcacatgtgctttacacct |
| | | gtgcttgtgtttaaaaattgtcacagctttcccaaaccaagtggtcttggttttcactctttaaactgattt |
| | | cact |
| 521 | VHEV | aattccttcttcctttctccttggacctcggtcccccggtctaagccgctcggaatatgacagggttatt |
| | | ttcacctcttctctcttctacttcatagtgttctatactatgaaagggtatgtgtcgccccttccttcttgga |
| | | gaacgtgcgtggcggtctttccgtctctcgaaaaacgtgcgtgcgacatgcagagtaacgcaaag |
| | | aaagcagttcttggtctagctctggtgcccacaagaaaacagctgtagcgaccacacaaaggcag |
| | | cggaaaccccctcctggtaacaggagcctctgcggccaaaagccacgtggataagatccaccttt |
| | | gtgtgcggtgcaaccccagcaccctggtttcttggtgacaccttagtgaaccctcgaatggcaatct |
| | | caagcgcctctgtaggaaagccaagaatgtccaggaggtaccccttcctcatggagggatctgac |
| | | ctggagacacatcacacgtgctatacacttgtgcttgtgtttaaaaattgtcacagctttcccaaacca |
| | | agtggtcttggttttcccttaacttcgaaaagtcactatggcctgcaaacatggatacccagacgtgt |
| | | gccct |
| 522 | TRV NGS910 | atgcgacgtggttggagattaaaccgactccgacgaaagtgctatcatgcctccccgattatgtgat |
| | | gttttctgccctgctgggcggagcattctcgggttgatacaccttgaatccttcatccttggacctcag |
| | | gtcccccggtctaagccgcttggaatacgacagggttattttccaatcttctcctttctactttcatgag |
| | | tcctattcatgaaaagggtctgtgctgccccttccttcttggagaatctgcgcggcggtctttccgtct |
| | | ctcgaaaagcgcagatgcagcatgctggaaccggtgaagaaaacagttctttgtggaaacttaga |
| | | gcagacatcgaaacagctgtagtgacctcacagtagcagcggaaccccctcctggtaacaggag |
| | | cctctgcggccaaaagccccgtggataagatccactgctgtgagcggtgcaaccccagcaccct |
| | | ggttcgatggttgttctctgtggaaccagagaatggtctttctcaagccctccagtagagaagccaa |
| | | gaatgtcctgaaggtaccccgcatggggatctgatcaggagaccaatcgtcagtgctttacactg |
| | | gcgctttggtttaaaaactgtcacagcttctccaaaccaagtggtcttggttttcacttttatcaaactgt |
| | | ttc |
| 523 | EMCV2 RD1338 | aaatactggtcgaaaccgcttgggataagaccggggtttgttaatgtctcaatgttattctccaccca |
| | | attgacgtcttttgtcaattggagggcagtgaaaccttgcccttgcttcttgcagaggattcccagtgg |
| | | tctttccgctctcgacaagggaattcatgatccaccaaaagttgtgaagagagcaggtcccatgga |
| | | agctttctgacgactgatgatgactgtagcgaccctttgcaggcagcggacccccccacctggtga |
| | | caggtgcctctgcggccaaaagccacgtgtttaacagacacctgcaaaggcggcacaaccccag |
| | | tgcctcatcaaaagtctgatgactgtggaaatagtcaaccggcttttcttaagcaaatttggtgtcgg |
| | | ggctgaaggatgcccggaaggtaccacactggttgtgatctgatccggggccacagtacatgtgc |
| | | tttacacatgtagctgcggttaaaaaacgtctaggccccccgaaccacggggacgtggttttccttt |
| | | gaaaaccacgattacaat |
| 524 | EMCV1 JZ1203 | gtctgctcgatatcgcaggctgggtccgtgactacccactccccctttcaacgtgaaggctacgata |
| | | gtgccaggggggtactgccgtaagtgccaccccaaaacaacaacaaaccccccctaacattact |
| | | ggccgacgccgcttggaataaggccggtgtgcgtttgtctatatgttatttcccaccacattgccgtc |
| | | ttttggcaatgtgtgggcccggaaacctggccctgtcttcttgacgagcattcctaggggtctttccc |
| | | ctctcgccaaaggaatgcaaggtctgttgaatgtcgtgaaggaagcagttcctctggaagcttcttg |
| | | aagacaaacaacgtctgtagcggccctttgcaggcagcggaaccccccacctggcgacaggtg |
| | | cctctgcggccaaaagccacgtgtataagatacacctgcaaaggcggcacaaccccagtgccac |
| | | gttgtgagttggatagttgtggaaagagtcaaatggctctcctcaagcgtattcaacaaggggctga |
| | | aggatgcccagaaggtaccccattgtatgggatctgatctggggcctcggtgcacatgctttacatg |
| | | tgtttagtcgaggttaaaaaacgtctaggccccccgaaccacggggacgtggttttcctttgaaaaa |
| | | cacgatgataat |
| 525 | EMCV1 AnrB- | atgtggtcgaagccacttggaataagaccggcgtgcgcttgtctatatgttacttccaccacattgcc |
| | 3741 | gtcttttggcaatgtgagggcccggaacctggccctgtcttcttgacgaacattcctaggggactttc |
| | | ccctctcgccaaaggaatgtaaggtctgttgaatgtcgtgaaggaagcagttcctctggaagcttctt |
| | | gaagacaaacagcgtctgtagcgaccctttgcaggcagcggaaccccccacctggtaacaggtg |
| | | cctctgcggccgaaagccacgtgtataagatacacctgcaaaggcggcacaaccccagtgccac |
| | | gttgtgcgttggatagttgtggaaagagtcaaatggctttccccaagcgtattcaacaaggggctga |
| | | aggatgcccagaaggtaccccactggttgggatctgatctggggcctcggtgcaggtgctttacac |
| | | ctgttgagtcgaggttaaaaaacgtctaggccccccgaaccacggggacgtggttttcctagaaaa |
| | | ccactatgacaat |
| 526 | Cosavirus D1 | cgtgctttacacggtttttgaaccccacaccggctgtttggcgcttgcaggacagtaggtatattttctt |
| | | tcatttctcttttctagccgcgtaggttctatctacgcgggcggagtgatactcccgctccttcttggac |
| | | aggcggcctccacgctctttgtggatcttaaggctgccaagtcactggtgtttgaagtgaagaatgg |
| | | agagacactagggcgtttcatgtggctttgccagggattgtagcgatgctgtgtgtgtgtgcggattt |
| | | cccctcgtggcgacacgagcctcacaggccaaaagccctgtccgaaaggacccacacagtggg |
| | | gttgccccgacccctcccttcaaagctttgtgtaaacaaacttttgtttagactttcttaagcttctctca |
| | | catcaggccccaaagatgtcctgaaggtaccctgtgtatctgaggatgagcaccaccaactaccc |
| | | ggacttgtgggacgtgtcccacagacgcatgtggtattccagccccctccttttgaggagggggct |
| | | tttgctcgctcagcacaggatctgatcaggagattcatctctggtgctttacaccagagcatggattta |
| | | aaaattgcccaaggcctggcaaacaacctaggggactaggttttctctattttaaaagatgtcaat |
| 527 | Cosavirus B1 | cgtgctttacacggtttttgaaccccacaccggctgtttggcgcttgcaggacagcaggtttattttctt |
| | | ttaactctctctttctagccacacacgatctatgtgtgtgggggagtgatactcccgttccttcttgga |
| | | caggcggcctccacgccctttgtggatcttaaggctaccaagtcactggtgttggaaagtgaagag |
| | | aaaggagttccttgggaactacatgtggcattgacagaggttgtagcgatgctgtgtgtgtgtgcgg |
| | | attacccccgtggcgacacggaccccacaggccaaaagccctgtccgaaaggacccacacagt |
| | | ggagcaaccccagctcccctcttcaatgttttgtgttagcaaccttggtattattttctctcaagcttcca |
| | | atacaccgggccccaaagatgtcctgaaggtaccccgtgtatctgaggatgagcaccatcaacta |
| | | cccggacttgttctttcgagaacagacgcatgtggtaacccagccccgatcctaaggggtcgggg |
| | | cttttgctcactcagcacaggatctgatcaggagacctcccccccctgctttacagggggcggggg |
| | | tttaaaaattgcccaaggcctggcaaataacctaggggactaggttttcctttttattttaaagttgtca |
| | | at |
| 528 | Cosavirus A SH1 | ccgtgctttacacggtttttgaaccccacaccggctgtttggcgcttgcaggacagcaggtttattttc |
| | | ttatgctctttatttctagccaacagggttctatcctgttgggcggagtgatactcccgttccttcttgga |
| | | cagattgcctccacgatctttgtggatctcaaggtgatcaagtcactggtaaatagagcgaaggttg |
| | | aggaaacctgaggaatttccatgtggttttgccaggagttgtagcgatgctgtgtgtgtgtgcggatt |
| | | tcccctcatggcaacatgagcctcacaggccaaaagccctgtccgaaaggacccacacagtgga |
| | | gcaatcccagctccctcctacaaagctttgtgagaatgaactcacgtttattcttctttattctctgtttac |
| | | atcaggccccaaagatgtcctgaaggtaccttgtgtatctgggcatgagcaccatcaactacccgg |
| | | acttgcatttcggtgcagacacatgtggttacccagcccctctgctttggcagaggggcttttgctcg |
| | | ctcagcacgagatctgatcaggagcccttcccagtgtgctttacacctggggggggttaaaaatt |
| | | gcccaaggcctggcaaaataacctaggggactaggttttccttttattaacaatgtctgtcatt |
| 529 | Malagasivirus B | ctttattttcttatgtaactcttctttttaagttttattttgcctacttgtgagcttatgcgggaccactgtctta |
| | | gacaaccccacatttgtcatgagtaagtacacgcaaccattacgattactttttaaccgtctgacctttt |
| | | gataacaactgaagttaggcgtgaaacatgcatttataccaaagtagccccgcatttccccactacg |
| | | gtgggggggctaccctactggctttggaactgtagccattatgtgttgcctggctttcaggatctcac |
| | | aacacaacagttctctcacaatggaatatgggtgagattgcagtgacatgaacaagtatctagtagt |
| | | acatagactcaagcctagttgcctgcggaacaacatgtggtaacacatgccccagggtccaaaag |
| | | acaagggttaacagccccttctaggtgtctgtgtgtgaagaatactttagtagtgttgttatgatctcac |
| | | ctgttagtacagaatgagtatggcttggtgaaggatgtcctacaggtacccattatatggatctgagt |
| | | aggagaccactagtggtggctttaccgccaggtgagtggtttaaaaagcgtctagccaagccaac |
| | | agcactagggatagtgctttctatattttatattttcagtgtat |
| 530 | Mosavirus A2 | cccccccctcaaattgcaacgatatagctaatggcgagattgagatgctatatcacctcttctaagtt |
| | SZAL6 | atagacctcatctgattgataaggacgtaatttggtcgaaaccgcttggaataagaccgatgcgcgt |
| | | agtcatgatgatgatgtaagatctaggaacttatccaatctgcttatgtctatgtaagtagaggggca |
| | | ggcctcattgccctaattctttctaccgagtatctgctagggtttctagcggcttgaatacttggattga |
| | | gggatacaagatactactgatcgattgtcgattgggaaacttgtagatacttcaaagctaccagtag |
| | | cgtggactcacagccagcggactacccctcatggtaacatgagcctctgggcccacaaggcacg |
| | | tcgcaagacctgtgagacggcaaccccagcctagctttgttgaggaaacaagcgataacatgaca |
| | | tgagagaccggaaggattcttgtattgtgagccgaaggatggcctctaggtacctcattttatgagat |
| | | ctgaggaggtgctcttgagttggtgctttacactgacaacacagagttaaaaagcgtctaagctcac |
| | | ccggaaattgggaaatttccgttatttccattttgtttgcaaagtcgttc |
| 531 | SVV | ctgggccctcatgcccagtccttcctttccccttccggggggtaaaccggctgtgtttgctagaggc |
| | | acagaggagcaacatccaacctgcttttgtggggaacggtgcggctccaattcctgcgtcgccaa |
| | | aggtgttagcgcacccaaacggcgcatctaccaatgctattggtgtggtctgcgagttctagcctac |
| | | tcgtttctcccctatccactcactcacgcacaaaaagtgtgctgtaattacaagatttagccctcgcac |
| | | gagatgtgcgataaccgcaagattgactcaagcgcggaaagcgctgtaaccacatgctgttagtc |
| | | ccttcatggctgcgagatggctatccacctcggatcactgaactggagctcgaccctccttagtaag |
| | | ggaaccgagaggccttcttgcaacaagctccgacacagagtccacgtgattgctaccaccatgag |
| | | tacatggttctcccctctcgacccaggacttctttttgaatatccacggctcgatccagagggtgggg |
| | | catgatccccctagcatagcgagctacagcgggaactgtagctaggccttagcgtgccttggatac |
| | | tgcctgatagggcgacggcctagtcgtgtcggttctataggtagcacatacaaat |
| 532 | PTV A | actagtccttggacttttgttgtgtttaaacacagaaatttaattacctggccatgaattcattggattaa |
| | | cccttctgaaagacttgctctggcgcgagctaaagcgcaattgtcaccaggtattgcaccagtggt |
| | | ggcgacagggtacagaagagcaagtactcctgaccgggcaatgggactgcattgcatatcccta |
| | | ggcacctattgagatttctctggggcccaccggcgtggagttcctgtatgggaatgcaggactgga |
| | | cttgtgctgcctgacagggtcgcggctggccgtctgtactttgtatagtcagttgaaactcacc |
| 533 | PTV B | cttccttttaattcgtaactgataagtgatagtccttggaagctaggtatttgttacgctagttttggatta |
| | | tcttgtgcccaacatttgttttcgaacatatgttgtgtttaaacacagaaatctagtttctttggttatgagt |
| | | ttaatggaatatccttttgaaagacttgccttggcgcgggctagagcgcaattgtcaccaggtattgc |
| | | accaatggtggcgacagggtacagaagagcaagtactcctgactgggtaatgggactgcattgca |
| | | tatccctaggcatctattgagatttctctggagcccaccagcatggagttcctgtatgggaatgcagg |
| | | actggacttgtgctgcctgacagggtcgcggctggccgtctgtactttgtatagtcagttgaaactca |
| | | tt |
| 534 | Tottorivirus | cccctttacgtaactgcaacttaaagagtaccctactgcattggatgtgtggtaaacttttacgcacac |
| | | atttgtagtagtgttagttatgttctacctaatgagtatgcatgcacccgtcgaaacacgcttgtgataa |
| | | gataggtgagtccatgtgactaatctcattaagataaataagcaccctacaacgcacggcacgctc |
| | | gtgtcttccgtgcggggccgggacaacagcggcctaaatcttctaggtgaccaccatgcttttggg |
| | | actatggcaccactgtggacgtgagtacctggcagtaagtctgtgaaaagatggaaggtgtccca |
| | | agctatggggcgtatgcatatagcctgcggaacaaacaacggcgacgttgtccccagggcccaa |
| | | aaggcacgtggataagatccacctatatgtttaccccatagtgtaagtcactggaagtcctagtaatg |
| | | gatgtctggagtaaggctcacggggtagggcgaaggatgcccagaaggtacccgtaggtaacct |
| | | taagagactatggatctgatctggggaccggatggcgccatcaccatgacgtggaggccggttta |
| | | aaaaacgtctaagcccgaccaacaacctaggggactaggttttccttttttattcatgtatgacgtt |
| 535 | Posavirus 1 | acatttccttgcgtgcgcacccgaaaatttattgaacttggcttgaatcataagtaatgcttcttatagc |
| | | ggacactttgagaatataatgcttgtatggattaatgtatactgttttaaataacaaacctagacacgc |
| | | agttgcgttgatggttgtatcaatcacatataagtgttgaactcgtgttaatcctcgatcgctatatgttt |
| | | gccgcctacttccaataaaatagattacatgcgcgtcatgcctttgtgggttacctattggcctctgac |
| | | aaaaacaagtcgtaagatttgtagcttcccggtgtaaaaagctgggcgcggtctggctctcgtagg |
| | | gtggaaaggtccaccaatggctggttgagtgtaagctccggtgtcctggttgtcgcaattccaggc |
| | | gtcgtaataacctatattgcatctgactctaactcttgtggctctactgtatctagttcttgttctactaact |
| | | ctaataatactactggctctaatactgaaaaacttacatatgttaatatagataatatccttgatcctgat |
| | | atccctcacgtcactgaagttcgccgaaaacgaatttcagatcatatcattgaatctcaaggatgtac |
| | | ttgctctgaacctactataactcctcatgcgttttcattttctactcttggc |
| 536 | A105-675 | ccacccacagcaagaatgccatcatctgtcctcacccccatttctcccctccttcccctgcaaccatt |
| | | acgcttactcgcatgtgcattgagtggtgcacgtgttgaacaaacagctacactcacgtgggggcg |
| | | ggttttcccgcccttcggcctctcgcgaggcccacccttccccttcctcccataactacagtgctttg |
| | | gtaggtaagcatcctgatcccccgcggaagctgctcgcgtggcaactgtggggacccagacagg |
| | | ttatcaaaggcacccggtctttccgcctccaggagtatccctgctagtgaattctagtggggctctgc |
| | | ttggtgccaacctcccccaaatgcgcgctgcgggagtgctcttccccaactcaccctagtatcctct |
| | | catgtgtgtgcttggtcagcatatctgagacgatgttccgctgtcccagaccagtccagcaatggac |
| | | gggccagtgtgcgtagtcgtcttccggcttgtccggcgcatgtttggtgaaccggtggggtaaggt |
| | | tggtgtgcccaacgcccgtactttggtgacaactcaagaccacccaggaatgccagggaggtacc |
| | | ccgcctcacggcgggatctgaccctgggctaattgtctacggtggttcttcttgcttccatttctttctt |
| | | ctgttc |
| 537 | A110-675 | acctttgtgcgcctgttttataccccctcccccaactgtaacttagaagtaacacacaccgatcaaca |
| | | gtcagcgtggcacaccagccacgttttgatcaagcacttctgttaccccggactgagtatcaataga |
| | | ctgctcacgcggttgaaggagaaagcgttcgttatccggccaactacttcgaaaaacctagtaaca |
| | | ccgtggaagttgcagagtgtttcgctcagcactaccccagtgtagatcaggtcgatgagtcaccgc |
| | | attccccacgggcgaccgtggcggtggctgcgttggcggcctgcccatggggaaacccatggg |
| | | acgctctaatacagacatggtgcgaagagtctattgagctagttggtagtcctccggcccctgaatg |
| | | cggctaatcctaactgcggagcacacaccctcaagccagagggcagtgtgtcgtaacgggcaac |
| | | tctgcagcggaaccgactactttgggtgtccgtgtttcattttattcctatactggctgcttatggtgac |
| | | aattgagagatcgttaccatatagctattggattggccatccggtgactaatagagctattatatatcc |
| | | ctttgttgggtttataccacttagcttgaaagaggttaaaacattacaattcattgttaagttgaatacag |
| | | caaa |
| 538 | 18-675 | cccacagcaagaatgccatcatctgtcctcacccccaattttcccttttcttcccctgcaaccattacg |
| | | cttactcgcatgtgcattgagtggtgcatgtgttgaacaaacagctacactcacatggggggggtt |
| | | ttcccgccctacggcctctcgcgaggcccaccccttccctccccttataactacagtgctttggtag |
| | | gtaagcatcctgatcccccgcggaagctgctcacgtggcaactgtggggacccagacaggttatc |
| | | aaaggcacccggtctttccgccttcaggagtatccctactagtgaattctagcggggctctgcttggt |
| | | gccaacctcccccaaatgcgcgctgcgggagtgctcttccccaactcaccctagtatcctctcatgt |
| | | gtgtgcttggtcagcatatctgagacgatgttccgctgtcccagaccagtccagtaatggacgggc |
| | | cagtgcgtgtagtcgtcttccggcttgtccggggcatgtttggtgaaccggtggggtaaggttggtg |
| | | tgcccaacgcccgtactttggtgacacctcaagaccacccaggaatgccagggaggtaccccac |
| | | ctcacggtgggatctgaccctgggctaattgtctacggtggttcttcttgcttccacttctttcttctgttc |
| | | acg |
| 539 | A115-675 | acctttgtgcgcctgttttataccccccccaacctcgaaacttagaagtaaagcaaacccgatcaata |
| | | gcaggtgcggcgcaccagtcgcatcttgatcaagcacttctgtaaccccggaccgagtatcaata |
| | | gactgctcacgcggttgaaggagaaaacgttcgttacccggctaactacttcgagaaacccagta |
| | | gcatcatgaaagttgcagagtgtttcgctcagcactacccccgtgtagatcaggccgatgagtcac |
| | | cgcacttccccacgggcgaccgtggcggtggctgcgttggcggcctgcctatggggcaacccat |
| | | aggacgctctaatacggacatggtgcgaagagtctattgagctagttagtagtcctccggcccctg |
| | | aatgcggctaatcctaactgcggagcacatacccttaatccaaagggcagtgtgtcgtaacgggta |
| | | actctgcagcggaaccgactactttgggtgtccgtgtttccttttaatttttactggctgcttatggtgac |
| | | aattgaggaattgttgccatatagctattggattggccatccggtgactaacagagctattgtgttcca |
| | | atttgttggatttaccccgctcacactcacagtcgtaagaacccttcattacgtgttatttctcaactcaa |
| | | gaaa |
| 540 | A73-675 | ttactccattcagcttcttcggaacctgttcggaggaattaaacgggcacccatactccccccaccc |
| | | cccttttgtaactaagtatgtgtgctcgtgatcttgactcccacggaacggaccgatccgttggtgaa |
| | | caaacagctaggtccacatcctcccttcccctgggagggcccccgccctcccacatcctcccccc |
| | | agcctgacgtatcacaggctgtgtgaagcccccgcgaaagctgctcacgtggcaattgtgggtcc |
| | | ccccttcatcaagacaccaggtctttcctccttaaggctagccccggcgtgtgaattcacgttgggc |
| | | aactagtggtgtcactgtgcgctcccaatctcggccgcggagtgctgttccccaagccaaacccct |
| | | ggcccttcactatgtgcctggcaagcatatctgagaaggtgttccgctgtggctgccaacctggtga |
| | | caggtgccccagtgtgcgtaaccttcttccgtctccggacggtagtgattggttaagatttggtgtaa |
| | | ggttcatgtgccaacgccctgtgcgggatgaaacctctactgccctaggaatgccaggcaggtac |
| | | cccacctccggggggatctgagcctgggctaattgtctacgggtagtttcatttccaatccttttatgt |
| | | cggagtc |
| 541 | Kobuvirus 16317 | ttactccattcagcttcttcggaacctgttcggaggaattaaacgggcacccatacacccccatccc |
| | | ctttctgcaacttaagtatgtgtgctcgtgatcttgactcccacggaatggatcgatccgctggagaa |
| | | caaactgctagatccacatcctcccttcccctgggaggaccttggtcctcccacatcctccccccag |
| | | cctgacgtaccacaggctgtgtgaagcccccgcgaaagctgctcacgtggcaattgtgggtcccc |
| | | ccttcatcaagacaccaggtctttcctccttaaggctagccccgatgtgtgaattcacattgggcaac |
| | | tagtggtgtcactgtgcgctcccaatctcggccgcggagtgctgttccccaagccaaacccctggc |
| | | ccttcactatgtgcctggcaagcatacctgagaaggtgttccgctgtggctgccagcctggtaaca |
| | | ggtgccccagtgtgcgtaaccttcttccgtcttcggacggtagtgattggttaagatttggtgtaaggt |
| | | ccatgtgccaacgccctgtgcgggatgaaacctctactgccctaggaatgccaggcaggtacccc |
| | | acccccggggggatctgagcctgggctaattgtctacgggtagtttcatttccaattcttttatgtcg |
| | | gagtc |
| 542 | Aichivirus | ttactccattcagcttcttcggaacctgttcggaggaattaaacgggcacccatacatccccatcccc |
| | Chshc7 | tttctgtaacttaagtatgtgtgcttgtaatcttgactcccacggaatggatcgatccgctggagaaca |
| | | aactgctagatccacatcctcccttcccctgggaggaccttggtcctcccacatcctccccccagcc |
| | | tgacgtaccacaggctgtgtgaagcccccgcgaaagctgctcacgtggcaattgtgggtcccccc |
| | | ttcatcaagacaccaggtctttcctccttaaggctagccccgatgtgtgaattcacattgggcaacta |
| | | gtggtgtcactgtgcgctcccaatctcggccgcggagtgctgttccccaagccaaacccctggcc |
| | | cttcactatgtgcctggcaagcatatctgagaaggtgttccgctgtggctgccagcctggtaacagg |
| | | tgccccagtgtgcgtaaccttcttccgtctccggacggtagtgattggttaagatttggtgtaaggttc |
| | | atgtgccaacgccctgtgcgggatgaaatctctactgccctaggaatgccaggcaggtaccccac |
| | | cctcgggtgggatctgagcctgggctaattgtctacgggtagtttcatttccaatccttttatgtcgga |
| | | gtc |
| 543 | Aichivirus | actccattcagcttcttcggaacctgttcggaggaattaaacgggcacccatacacccccatcccct |
| | Goiania | tttttgcaacttaagtatgtgtgctcgtaatcttgactcccacggaatggatcgatccgctggagaaca |
| | | aactgctagatccacatcctccctcccccctgggaggacctcggtcctcccacatcctccccccag |
| | | cctgacgtatcacaggctgtgtgaagcccccgcgaaagctgctcacgtggcaattgtgggtcccc |
| | | ccttcatcaagacaccaggtctttcctccttaaggctagtcccgatgtgtgaattcacatcgggcaac |
| | | tagtggtgtcactgtgcgctcccaatctcggccgcggagtgctgttccccaagccaaacccctggc |
| | | ccttcactatgtgcctggcaagcatatctgagaaggcgttccgctgtggctgccagcctggtaaca |
| | | ggtgccccagtgtgcgtaaccttcttccgtccccggacggtagtgattggttaagacttggcgtaag |
| | | gttcatgtgccaacgccctgtgcgggatgaaacctctactgccctaggaatgccaggcaggtacc |
| | | ccaccttcgggtgggatctgagcctgggctaattgtctacgggtagtttcatttctaattctttcatgtc |
| | | ggagtc |
| 544 | Aichivirus | ttactccattcagcttcttcggaacctgttcggaggaattaaacgggcacccatacacccccacccc |
| | ETHP4 | ctttttgcaacttaagtatgtgtgctcgtgatcttgactcccacggaatggatcgatccgctggagaa |
| | | caaactgctagatccacatcctcccttcccttgggaggacctcggtcctcccacatcctccccccag |
| | | cctgacgtaccacaggctgtgtgaagcccccgcgaaagccgctcacgtggcaattgtgggtccc |
| | | cccttcattaagacaccaggtctttcctccttaaggctagtcccgatgtgtgaattcacattgggcaac |
| | | tagtggtgtcactgtgcgctcccaatctcggccgcggagtgctgttccccaagccaaacccctggc |
| | | ccttcactatgtgcctggcaagcatatctgagaaggtgttccgctgtggctgccagcctggtaacag |
| | | gtgccccagtgtgcgtaaccttcttccgtcttcggacggtagtgattggttaagatttggcgtaaggtt |
| | | catgtgccaacgccctgtgcgggatgaaacctctactaccctaggaatgccaggcaggtacccca |
| | | ccctcgggtgggatctgagcctgggctaattgtctacgggtagtttcatttccaattcttctatgtcgg |
| | | agtc |
| 545 | Aichivirus | tactccattcagcttcttcggaacctgttcggaggaattaaacgggcacccatacacccccaccccc |
| | DVI2169 | ttttctgcaacttaagtatgtgtgctcgtaatcttgactcccacggaatggatcgatccgctggagaac |
| | | aaactgctagatccacatcctcccttcccctgggaggaccccggtcctcccacatcctccccccag |
| | | cctgacgtatcacaggctgtgtgaagtccccgcgaaagctgctcacgtggcaattgtgggtccccc |
| | | cttcatcaagacaccaggtctttcctccttaaggctagccccgatgtgtgaattcacattgggcaact |
| | | agtggtgtcactgtgcgctcccaatctcggccgcggagtgctgttccccaagccaaacccctggc |
| | | ccttcactatgtgcctggcaagcatatctgagaaggtgttccgctgtggctgccagcctggtaacag |
| | | gtgccccagtgtgcgtaaccttcttccgtctccggacggtagtgattggttaagatttggtgtaaggtt |
| | | catgtgccaacgccctgtgcgggatgaaacctctactgccctaggaatgccaggcaggtacccca |
| | | ccttcgggtgggatctgagcctgggctaattgtctacgggtagtttcatttccaattcttttatgtcgga |
| | | gtc |
| 546 | Aichivirus | gcttcttcggaacctgttcggaggaattaaacgggcacccatacacccccacccccttttctgcaac |
| | DVI2321 | ttaagtatgtgtgctcgtaatcttgactcccacggaatggatcgatccgctggagaacaaactgcta |
| | | gatccacatcctcccttcccctgggaggaccccggtcctcccacatcctccccccagcctgacgta |
| | | tcacaggctgtgtgaagtccccgcgaaagctgctcacgtggcaattgtgggtccccccttcatcaa |
| | | gacaccaggtctttcctccttaaggctagccccgatgtgtgaattcacattgggcaactagtggtgtc |
| | | actgtgcgctcccaatctcggccgcggagtgctgttccccaagccaaacccctggcccttcactat |
| | | gtgcctggcaagcatatctgagaaggtgttccgctgtggctgccagcctggtaacaggtgcccca |
| | | gtgtgcgtaaccttcttccgtctccggacggtagtgattggttaagatttggtgtaaggttcatgtgcc |
| | | aacgccctgtgcgggatgaaacctctactgccctaggaatgccaggcaggtaccccaccttcggg |
| | | tgggatctgagcctgggctaattgtctacgggtagtttcatttccaattcttttatgtcggagtc |
| 547 | Aichivirus rat08 | tactccattcagcttcttcggaacctgttcggaggaattaaacgggcacccactttcctgtcctctccc |
| | | cttttctgtaactccaagtgtgtgctcgtaatcttgactcccgcggattgaccgctccgctggtgaaca |
| | | aactgctaggtcatctcctccccacccttgggcgtccttccgggcgtccacaccctccccccagcc |
| | | tgacgtgtcacaggctgtacaaagaccccgcgaaagctgctaacgtggcaattgtgggtcccccc |
| | | tttgtaaaggaaccgagtctttctcccttaaggctagacccctgtgtgaattcacaggtggcaactag |
| | | tggttccactgcatgctcccgacctcggccgcggagtgctgttccccaagtcgtaacactgaccttc |
| | | acttatgtgcctggcaagcatatctgagaagatgttccgctgtggctgccaaacctggtaacaggtg |
| | | ccccagtgtgcgtagtcttcttccgtcttcggacggtaggtgttaggtaaagatgcggcgtaaggtt |
| | | caagtgccaacgccctggaagggatgacccttctactgccctaggaatgccgcgcaggtacccc |
| | | aggttcgcctgggatctgagcgcgggctaattgtctacgggtagtttcatttccctcttcttccactgg |
| | | catc |
| 548 | Aichivirus Rt386 | actccattcagcttcttcggaacctgttcggaggaattaaacgggcacccactttcctgtcctctccc |
| | | cctttctgcaactcaagtgtgtgctcgtaatcctgactcccacgggttgaccgccccgttggtgaac |
| | | aaacagctaggtcattcccccctacccctgggcgccatttcagtgggttcatatcctccccccag |
| | | cctgacgtgtcacaggctgtgcaaagtccccgcgaaagctgctcacgtggcaattgtgggtcccc |
| | | cctttgtgaaggaaccgagtctttctcccttaaggctagacccctgtgtgaactcacaggtggcaac |
| | | tagtggttccactgcatgctcccgacctcggccgcggagtgctgttccccaagtcgtgacactgac |
| | | ctccacttatgtgcctggcaagcatatctgagaagatgttccgctgtggctgccaaacctggtaaca |
| | | ggtgccccagtgcgtgtagtcttcttccgtctccggacggtaagtgtgtggtaaagatgcggcgtaa |
| | | ggttcaagtgccaacgccctggaagggatgacccttctactgccctaggaatgccgcgcaggtac |
| | | cccaggttcgcctgggatctgagcgcgggctaattgtctacgggtagtttcatttccctctcttttcact |
| | | ggcatc |
| 549 | Norway Rat | gtataagggttgggaaccttgtaccaagctacctctgccattcagtatttgggagtagaagtagatgt |
| | Pestivirus | gtttacaaactcacacgtgtgggggggggatagactgtgccagcggtcgtgtaccagcacctac |
| | | gcatacgtgtggactgcgaaccaggagagcacctaggtctgacaagctgtgagaacacagtagt |
| | | cgtcagtgagtcagctggtaaggatcacccacctggatactcacgtggacgagggagtttcccag |
| | | tcagaaacctacaccagaggaggggtcctctggagacatggatggtctgagtaacagactatcta |
| | | ctggggtgtgctgcctgacagggtctcggctgatagcctggctagcagtataaaaatcagttgaatt |
| | | ggcatatgagttgtgaacatctagtaaacaatgaaagacaaaaacaaaaaat gagcataataaaaa |
| | | aattgtacaatccactactcaggtgtggctgcagactt |
| 550 | Porcine | tttgaaaaggggggggggggcctcggccccctcaccctcttttccggtggccattcgcccgggc |
| | Kobuvirus GS2 | caccgttactccactccactccttcgggactggtttggaggaacacaacagggcttcccatccctgt |
| | | ttaccctttattccatcatcctttccccaagtttaccctatccacaccccactgactgactcctttggattt |
| | | tgacctcagaatgcctatttgacctcccactcgcctctcccttttcggattgccggtggtgcctggcg |
| | | gaaaaagcacaagtgtgttgcaggctaccaaactcctacccgacaaaggtgcgtgtccgcgtgct |
| | | gagtaatgggataggagatgcctacaacaggctcgcccatgagtagagcatggactgcggtgca |
| | | tgtgacttcggtcaccacgggcatagcattgctcacccgtgaatcaagtcatcgagatttctctgacc |
| | | tctgaagtgcactgtggttgcgtggctgggaatccacgcttgaccatgtactgcttgatagagtcgc |
| | | ggctggccgactcatgggttaaagtcagttgacaagacac |
| 551 | Kobuvirus | cctacccaagggttacatgggaccatattcctcctcccctgtaactttaagttttgtgcccgtattcttg |
| | SZAL6 | actccaggcggatgttgtgtcgcccgtcctgtgaacaaacagctagacactttcctccccccctct |
| | | gggctgctccggcagtccactccctccccccagcgtaacatgccccgctggagtgatgcacctgg |
| | | aagtcgtggacgtgggttagtaacttcggtgaaaacccactataatgacaactggttgacccccac |
| | | actcaaaggactcgagtctttctcccttaaggctagcccggccacatgaatttgcagctggcaacta |
| | | gtgagtccaccatgtcccgcaacctcggctgcggagtgctgttccccaagcgtatgccttccttctg |
| | | taagagtgcgcctggcaagcacatctgagaagtcgttccgctgcgtcgtgccaacctggcgacag |
| | | gtgacccagtgtgcgtagacttcttccggattcgtccggctcttctctaggaaacatgcgtgtaaggt |
| | | tcatgtgccaaagccctgcgcgcggtgttcttctactgccctaggaatgtgccgcaggtacccctac |
| | | ttcggtagggatctgagcggtagctaattgtctacgggtagtttcatttccatcttctcttcaggtcgac |
| | | atc |
| 552 | Kobuvirus sheep | gaccttctggtacttcttcgcctgggtcacaaaagcgaagaacctgcctctctaacgccagacgag |
| | TB3 | cggcattaaacttgaacttctggcactctccactctcccttttccctgtccctttccccactgcgctctc |
| | | aaggtcgcgcaatcctgggactagcccagttttaaaagttcctggcaccctttgcccctctaggccc |
| | | ttaaggtaggaactgaccttgtgctgtgatctcggtgcgggagtgctaccacgtagtcatcgtaagc |
| | | ctcgtttctggttctgccctggcaaggctacagagtaccgtgttccgctgtggatgccatccgggta |
| | | accggacccccagtgtgtgtagcggtatgttcacggtccgccgtgttcaccagattcctgacctgg |
| | | ctttgctagaaatggtgtgtgcccaatccctgtgaccagtatcaattacatcacctaggaatgctagg |
| | | aaggtaccccagtcctgagctgggatctgatcctaggctaattgtctacggtgatgctccttttattttc |
| | | ttacaactgctattgactgtctgattgctgattctgctcttgtgctcttctgctctggctcattctcaaggg |
| | | ttctctttgtccaagatcctttggttctctccttgttccacttgccactgccaacgcttgtc |
| 553 | Pronghorn | gtatacgcagttagttcatcctgtgtatacagattggagactctaaaaacaacgattcggaataggg |
| | antelope | gcccgcggcgaagaccgaagacaggctaaccatgccgttagtagggctagcaccaaaacgcg |
| | pestivirus | ggaactagacacttaggagagtggtctggctactctaagaggtgagtacaccttaaccgtcaagg |
| | | gttctactcctcagttgaggactagagatgccctgtggacgggggcatgcccaagagttagcttag |
| | | ccggggcgggggttgttccggtgaaagtagcaatattgaccacactgcctgatagggcggagca |
| | | ggccccctaggtagtctagtataaaatgtctgctgtacatggcac |
| 554 | Porcine pestivirus | tacgcggggtataacgacagtagttcaagtgtcgttatgcatcattggccataacaaattatctaattt |
| | isolate | ggaatagggacctgcgacctgtacgaaggccgagcgtcggtagccattccgactagtaggacta |
| | Bungowannah | gtacaaataggtcaactggttgagcaggtgagtgtgctgcagcggctaagcggtgagtacaccgt |
| | | attcgtcaacaggtgctactggaaaggatcacccactagcgatgcctgtgtggacgaggacatgtc |
| | | caagccaatgttatcagtagcgggggtcgttactgagaaagctgcccagaatgggtagttgcacat |
| | | acagtctgataggatgccggcggatgccctgtattttgaccagtataaatattatccgttgtaaagcat |
| 555 | Porcine pestivirus | gcagatatcggtggtggacctgggggttgggctcaccgtgccccttcatggggtagacctcactg |
| | 1 | cttgatagagtgccggcggatgcctcaggtaagagtataaaatccgttgttcactaac |
| 556 | Pestivirus giraffe- | gtatacgagtttagctcaatcctcgtatacaatattgggcgtcaccaaatatagatttggcataggca |
| | 1 | acaccccgatgcgaaggccgaaaagggctaaccatgcccttagtaggactagcaaaaaatcggg |
| | | gactagcccaggtggtgagcttcctggatgaccgaagccctgagtacagggcagtcgtcaacagt |
| | | tcaacacgcagaataggtttgcgtcttgatatgctgtgtggacgagggcatgcccacggtacatctt |
| | | aacctatccgggggtcggataggcgaaagtccagtattggactgggagtacagcctgatagggtg |
| | | ttgcagagacccatctgataggctagtataaaaaactctgctgtacatggcac |
| 557 | Classical swine | gtatacgaggttagttcattctcgtatgcatgattggacaaattaaaatttcaatttggatcagggcctc |
| | fever virus | cctccagcgacggccgaactgggctagccatgcccacagtaggactagcaaacggagggacta |
| | | gccgtagtggcgagctccctgggtggtctaagtcctgagtacaggacagtcgtcagtagttcgac |
| | | gtgagcagaagcccacctcgatatgctatgtggacgagggcatgcccaagacacaccttaaccct |
| | | agcgggggtcgctagggtgaaatcacaccacgtgatgggagtacgacctgatagggtgctgcag |
| | | aggcccactattaggctagtataaaaatctctgctgtacatggcac |
| 558 | Human pegivirus | tcagggttggtaggtcgtaaatcccggtcaccttggtagccactataggtgggtcttaagagaaggt |
| | isolate JD2B1I | taagattcctcttgtgcctgcggcgagaccgcgcacggtccacaggtgttggccctaccggtggg |
| | | aataagggcccgacgtcaggctcgtcgttaaaccgagcccgtcacccacctgggcaaacgacgc |
| | | ccacgtacggtccacgtcgcccttca |
| 559 | Human pegivirus | cccggcactgggtgcaagccccagaaaccgacgcctatttaaacagacgttatgaaccggcgcc |
| | isolate GBV-C- | gacccggcgaccggccaaaaggtggtggatgggtgatgccagggttggtaggtcgtaaatcccg |
| | ZJ | gtcatcttggtagccactataggtgggtcttaagggttggtcaaggtccctctggcgcttgtggcga |
| | | gaaagcgcacggtccacaggtgttggccctaccggtgtgaataagggcccgacgtcaggctcgt |
| | | cgttaaaccgagcccattacccacctgggcaaacaacgcccacgtacggtccacgtcgccctaca |
| | | atgtctctcttgaccaataggctttgccggcgagttgacaaggaccagtgggggctgggcgacgg |
| | | gggtcgtataggaagaaaaatgccacccgccctcacccgaaggttcttgggctaccccggctgca |
| | | ggccgccgcggagctggggtagcccaagaaccttcgggtgagggcgggtggcatttttcttccta |
| | | taccgatc |
| 560 | Human pegivirus | tggtcaccttggtagccactataggtgggtcttaagagaaggttaagattcctcttgtgcctgcggcg |
| | isolate JD2B8C | agaccgcgcacggtccacaggtgttggccctaccggtgtgaataagggcccgacgtcaggctcg |
| | | tcgttaaaccgagcccatttcccgcctgggcaaacgacgcccacgtacggtccacgtcgccctttt |
| | | aatgtctctcttgaccaataggttcatccggcgagttgacaaggaccagtgggggccgggggtca |
| | | cagggatggaccctgggccctgcccttcccggcggggggggaaagcatggggccacccagct |
| | | ccgcggcggcctgcagccggggtagcccaagaaccttcgggtgagggcgggtggcatttttctt |
| | | cctataccgatc |
| 561 | Hepatitis GB | gccgggtggaaggcccggaaccgccccaccacctcaactaggtggtaagggtacgtctatcggt |
| | virus A | ccggctggcccgaaaggcggtggatcctgtgtgttagggttcgtaggtggtaaatcccagcacag |
| | | gtggtaatcgctatagggcaggcttatcccggtgaccgcttccctggatcctggagcgggtcgtgg |
| | | cggcacggtccacaggagtggggcctccggtgtgaataagccctcgtctggagcatcagacgtt |
| | | aaactgagacgtcccgaagagatcggaacgacgccccacgtatggcaacgccgcttaaaaccct |
| | | tcggggacagctatgcgggttgacaatgccagtggggggccgggcccactattgttgtgggctcc |
| | | gagttcctctagggatggccgaaaggcagccatggggccacccaggcggcgccgtgctacagg |
| | | cggcaaggggaaaaatccttcgggtgaccccgggtggcattccctcccttagcagcatgagtgtg |
| | | gtggtagctgcaacc |
| 562 | Simian pegivirus | ggggaatctcaccccccgtccggttccggaagaatcggaaaccgacaccctgaccaatcattctt |
| | | gatcatagagtggatgttagtgaaagccagacgaaagccggcggatgggtggtgacagggttgg |
| | | taggtcgtaaatcccggccaccctggtacccggtataagttgggcggaagctgactgaagctccg |
| | | tgctcttttctgtgcgttcttggtgcacggtccacaggtgacgcctataccggtgtgaataataggcc |
| | | gactcgagcggagtcgttaaactgagaacctccatacggatggcaacttggcttgcgtacgggga |
| | | cgccgctaaagtcacagtgggttaagtccggcgggttgacaaccccagcaaggcgagggggtc |
| | | ctattgttggactctgccagttcccggtggaggtaggcatggggtggcccagctccgcggcgcgc |
| | | tacagccggggtagcccaaaatccgaaaggtgaggggggccacatgtccgaaatttagtcaag |
| | | c |
| 563 | Pegivirus I | agaatggtctaagtggttgccaccgtggtccgaaggggaggaggacctacgctgccagggttgg |
| | | caggtcgtaaatcccgggtgtaggagatccctccttgttaggactgctggtagctggggggtcggt |
| | | gaccccctgggcaaccgccaaacccggacgaccgggtggggctccatgttggcacggtccac |
| | | aggtgtgaaccctaccggtgtgaataagggttggtggttgcggtccaccttaaacgtagtatgcatt |
| | | gggcttggtaaaacaccgctcgtagtacggaacgccgcctttaaagacacagtaggcgtagccg |
| | | gcgggttgacaatccatacggggggggggtgtggtcatggatctgtccacaccaccttcatgcg |
| | | gccctctaagcaagccataccggggggaggcgcgcggcaccgcactgccgggcaaggggaa |
| | | gaaccttcgggtgacccccccccaaccaccgtccgatcaatgctaatgttgcgtttaggcgtgaca |
| | | ccggcaca |
| 564 | Pegivirus K | agaatggtgtgatccgtcgccgctccagcggaaagcgggcgggatctagtggttagggttgttcg |
| | | cgtaaatcccacactagtggtacgctcgtataacgtgggagcagccggTggggtcgacccccc |
| | | Acctggcggctgctgagcaccggacgaagcgcggggggtgaacgctaacccgcggcccggg |
| | | ctgccaacgttaggcacgtcttggctggaagacgttaaacacagggccccccctcaaccctgatc |
| | | cgaggccagagaccaaggtacgccgcccttttaaaggcgttactcgtccaataggatctctccgg |
| | | cgggttgtcaaaccttgctggccctggtgatggttacgggagggggggggggggagtagaag |
| | | ccccgcccggcatgggggtaccaagctcggcacgcccagcacgcgtggcgtaggggaaaaat |
| | | ccttcgggtgacccctggtaccataaagtaattaacatgagcatgccgctagggtgtgctttttcttcc |
| | | ttccttgggaaggcggtggcacc |
| 565 | Theiler's disease- | tgataccgtgtcccggtacgacctcgcgcgtccccaagctcgccctgaggggggagcgtaaggg |
| | associated virus | cgcgtagtggggtagccccccaaaccgagccaccctagtgagtgactttagaatggttagggaga |
| | | ctaccgccttcgctgtttggggacctaatgatccgcgtgccagggttcttcgggtaaatcccggcgc |
| | | ggtgttttgggttcagggcagtaggggcagacgggccagcagtcgctggttcctggtaccaccac |
| | | cctatccggacgacctccctcacgaaaggtcgccacggtctgtggctcgacgacgcctataattca |
| | | gtccgaggggcgcagccctcgttaaacttaggcaaggttcctcgccattgatttggccaggggttt |
| | | aagtgaacgccgcccttttaatgtttaatagggttctttcccgggggttgacaaacacttccctggg |
| | | ctcttcgttggcctcggttccttgatgcttcggcacccatgagcgcacaggggggggaccctgcga |
| | | cagtccgccaagaggaaaatccttcgggtgacctcgtgcgcaacccaatcccttcttcttccacatg |
| | | gcgtgtctgtggtgcatgctgtg |
| 566 | Rodent pegivirus | ggacttcggtccccctgttactctgcgagccaccgcagagccagggttggtacgcccgaggtgtt |
| | | agaccccggccgaaagctcctaaccatggggttagtaggacgtggtaaatgccactgaggggtt |
| | | ggagagctggtagagcgagtaagtcggcgtaaggcccgagtacgggcctcccagcccgggtca |
| | | gcctaaacctggctgtgatacccggtgcatggagggcgtgtcccaacgctcgatcgctgtagggt |
| | | gggtccctgcagttgggtgtggctaccctgctcgtactgcttgatagagtcccggggacggacc |
| | | agctctcgtcagtccgtggagttgcac |
| 567 | Human pegivirus | aactgttgttgtagcaatgcgcatattgctacttcggtacgcctaattggtaggcgcccggccgacc |
| | 2 | ggccccgcaagggcctagtaggacgtgtgacaatgccatgagggatcatgacactggggtgag |
| | | cggaggcagcaccgaagtcgggtgaactcgactcccagtgcgaccacctggcttggtcgttcatg |
| | | gagggcatgcccacgggaacgctgatcgtgcaaagggatgggtccctgcactggtgccatgcg |
| | | cggcaccactccgtacagcctgatagggtggcggcgggcccccccagtgtgacgtccgtggag |
| | | cgcaac |
| 568 | GB virus | cccccggcactgggtgcaagccccagaaaccgacgcctatctaagtagacgcaatgactcggcg |
| | C/Hepatitis G | ccgactcggcgaccggccaaaaggtggtggatgggtgatgacagggttggtaggtcgtaaatcc |
| | virus | cggtcaccttggtagccactataggtgggtcttaagagaaggttaagattcctcttgtgcctgcggc |
| | | gagaccgcgcacggtccacaggtgttggccctaccggtgggaataagggcccgacgtcaggct |
| | | cgtcgttaaaccgagcccgttacccacctgggcaaacgacgcccacgtacggtccacgtcgccct |
| | | tcaatgtctctcttgaccaataggcgtagccggcgagttgacaaggaccagtgggggccggggg |
| | | cttggagagggactccaagtcccgcccttcccggtgggccgggaaatgc |
| 569 | Equine Pegivirus | agaatggggagttaactcctggcactggcccgaagcatgaactgatcgcggtggcagggttcttc |
| | 1 | gggtaaatcccggccgcgtgttgtgattgtgttagggcaggtgacagtcggcagggtcgaccccc |
| | | tgcttcaggaccactgtcttcctggacgaccgttgctgaaaaagggccgccacggtctgtagctcg |
| | | ccgacgcttctaattcaggccggaggaccacgctccgtaatcgagcccaagtactcaaaccccag |
| | | cacccctgggtcacgccctacgccgcccttttaacgcttcggctaatagggtctatccgggggtt |
| | | gacaaagggcgcagggttacctggtactacgagcttgggtgtccctgggagtaatcccagggtgc |
| | | c |
| 570 | Culex theileri | atataaatcccagtttggttaaacctatttcaaggcttaagttgtttattattttatcgccgctcgtgactat |
| | flavivirus | aaagttgcctagcggagagagataaagaagaaggagttcaaggctcagggcagggcgcaagtt |
| | | ccctggtccctaggccgctcgcaggaaggaggagtgaagaagaagaaagagaaggagaggac |
| | | caccgccgaaagaaggcaggtgcctcacaagagggccaaccagcgtgttggaccagtggcca |
| | | acgccggacggcgtggtggcctgctgggacgcctggggattggatggagtgccttcctacagga |
| | | agacatcgttcaagccatc |
| 571 | Bussuquara virus | agtatttcttctgcgtgagaccattgcgacagttcgtaccggtgagttttgacttaacgcagtgagaa |
| | | aagttttcgaggaaagacgagaagcgaattctctga |
| 572 | Zika Virus | agttgttgatctgtgtgagtcagactgcgacagttcgagtctgaagcgagagctaacaacagtatca |
| | | acaggtttaatttggatttggaaacgagagtttctggtc |
| 573 | Yokose virus | agtaaattttgcgtgctagtcgctgagcgtcagaccgcaaagtgagtttttagtgatctaaagtgagg |
| | | agttattcttactgtcatcaaacactacaaataaacacgttgaaattatttccggaagaacaactgtcc |
| | | ggaatcaaagacg |
| 574 | Wesselsbron | agtatattctgcgtgctaatcgttcgacgttagtccgtggagtgagcttctattagagtcgttaacacg |
| | virus | tttgaataatttctactgaaaggagtagaagaaaggagattcattccca |
| 575 | Equine | acctccgtgctatgcacggtgcgttgtcagcgttttgcgcttgcatgcgctacacgcgtcgtccaac |
| | hepacivirus | gcggagggattcttccacattaccatgtgtcactccccctatggagggttccaccccgcccacacg |
| | | gaaataggttaaccatacctatagtacgggtgagcgggtcctcctagggcccccccggcaggtcg |
| | | agggagctgaaattcgtgaatccgtgagtacacggaaatcgcggcttgaacgtcatacgtgacctt |
| | | cggagccgaaatttgggcgtgccccacgaaggaaggcgggggcggtgttgggccgccgcccc |
| | | ctttatcccacggtctgataggatgcttgcgagggcacctgccggtctcgtagaccataggac |
| 576 | Hepacivirus B | accacaaacactccagtttgttacactccgctaggaatgctcctggagcaccccccctagcagggc |
| | | gtgggggatttcccctgcccgtctgcagaagggtggagccaaccaccttagtatgtaggcggcgg |
| | | gactcatgacgctcgcgtgatgacaagcgccaagcttgacttggatggccctgatgggcgttcatg |
| | | ggttcggtggtggtggcgctttaggcagcctccacgcccaccacctcccagatagagcggcggc |
| | | actgtagggaagaccggggaccggtcactaccaaggacgcagacctctttttgagtatcacgcct |
| | | ccggaagtagttgggcaagcccacctatatgtgttgggatggttggggttagccatccataccgta |
| | | ctgcctgatagggtccttgcgaggggatctgggagtctcgtagaccgtagcac |
| 577 | Hepacivirus I | cagggtttcgaccctggcccggatacctatcgccttacgccgaaaggtaacgagtaggagtcggg |
| | | tccccaggcccttaccgccaccaagccaggtggggaggtatgggagccggggggtgcagctg |
| | | gtagctccatgggggacgccccgtgagcggatgctgcatcgataccgggttagctctctgggaga |
| | | gcggcacttgacaccacgaatccgggaaccggacaatcgccggcgtgggacgcgttgcctccg |
| | | tggccgagcaatttggcatgcccgtggtgaagagtgatggtgggggggggccccccttccagta |
| | | ccgtactgcctgatagggtcttgcctcaagcccagagagtcgaggctgaaaaccgccatc |
| 578 | Hepacivirus J | gccgctcccgaaagggagtccggcgcgtcatcccactccgaggagtggggggcgtccccgtg |
| | | tgccggggaaccatgaagcctaagggcatccacattttagaatgaacttgaagcttcgtttcgctgg |
| | | ccggaaagtcctgggttcccatggccagggttccgcaggtgggtaaatcccggtggggttccatc |
| | | caggatatacggcaggcgggcgtagtccggcggttcggacgacgtgtgggtcgcctacggtgg |
| | | attgttcacaggatgggcactccggtgtgaataggccccgtcagggtgcgctgacgttaaactcag |
| | | gccttgcctggtgttcggggaggattgcagggccacgccgcctctaagggccgtatggcacagta |
| | | cttcttcggggggttgtcaaggccctccaacgcgacaccagtgcctcggcaggcatggggcca |
| | | cccagctcggcgtcccgcacacagacggcgtaggggaaaatcagcaatgtgaccccgggtggc |
| | | attttccttctctctacttccatgcatgatcaaccgcaatc |
| 579 | Hepacivirus K | gggaacaatggtccgtccgcggaacgactctagccatgagtctagtacgagtgcgtgccacccat |
| | | tagcacaaaaaccactgactgagccacacccctcccggaatcctgagtacaggacattcgctcgg |
| | | acgacgcatgagcctccatgccgagaaaattgggtatacccacgggtaaggggtggccacccag |
| | | cgggaatctgggggctggtcactgactatggtacagcctgatagggtgctgccgcagcgtcagtg |
| | | gtatgcggctgttcatggaac |
| 580 | Icavirus | cgaagtttaagctaagcaccctcgggcgttcccggattatgtgatcacatcaatttgatggctggtca |
| | | ccacgcaacgcctggagagatactcttacttttctcttaagatccccggtcatttgacgcttgtaggat |
| | | gatagggttattttccactataaatactttcatactcttggatgttctatatccaagacgggaggaccta |
| | | ccccgtaccccttagaggtgagatgccaagaacaggccctttctgttctctcgacaatggcatcata |
| | | ggcaacaagcatcacaccaagattgctaagttttgttaagagttcttcaagctatagggtggctgtag |
| | | cgaccttctgatgcctgcggatttccccacggagcgatccgtgccacaggggccaaaagccacg |
| | | gctaacgcccatcaggagcggcacttaccccgtgccccacccttgaaacttgaatgttcacactgg |
| | | cttctctcggctttctgaactgtctgcttgttggggccccgaaggatgccctggaggtaccccatttta |
| | | tgggatctgaccaggggacacctcagctctctaagttgctggtgtttaaaaaacgtctaagggccc |
| | | ccaccccttaggtggagggatccacctttcctttattttttaaaactcttttatggtcacaattgttt |
| 581 | Antarctic penguin | ctaggagactacgcagtgggataagatgactatgatgtcgtacgggcagaagccagtacagtcga |
| | virus A | agtcgagaccgacgtcgaggatttgactctgcctgacctagtgccatc |
| 582 | Forest pouched | tattggatccgcctccgggcaaaggttactttcttgtacctcggcttagccacagggtgaccccttgt |
| | giant rat | acgtaggggccccgacgtagcactggtctgacaacaccttctcggcatttcaccttctgcccgctct |
| | arterivirus | tccgggcggtggtgtcaagaagcagcagtgctcttctcttttcttcctgcagttcaccgagccctacg |
| | | gggggtaggtg |
| 583 | Avisivirus Pf- | cattcccctttccccagccatgggttaaatggcccctcaccaggttcggtgctgtctaggcttccagt |
| | CHK1 | aaagaagtcaaccgagcattgaacaaaacctcagtgggtatggtagttaaccccgtccactggac |
| | | aactttgtcctcttaaaagtggatcaatccaccccaactccccccctagccacctgagccatggtgg |
| | | atagcagtgacgaaactagggaccccaatacctctagtgccaagagaattcccccctcgcgagag |
| | | gtgctcttgggcccgaaaggctagttggcagggtgaagtgaaggaagctgctagcgtggcaacc |
| | | ttaagcgtagcccgaagctgaccttagaggttaaccctagtggaccactggatgaagctgtggag |
| | | gtggtggataggaaagttggccacttgtgagtagatgcccagaaggcataaggctgatctggggc |
| | | cagtgactataccgttccggtaaacctggtataaaaaccatgaaagcaagtgggtttaaaatttcttct |
| | | aattccttcatttcagtagtgataactggcaga |
| 584 | Avian | accaaacaaggactagataacccacgtgaccgttaactggaaaataagatgttgtaggggcgacc |
| | paramyxovirus | tagttggaattcgaccccggctccgaaacctctaattgtggttattggcagtctagtctacttctaacg |
| | penguin | |
| 585 | Newcastle | accaaacagagaatctgtgaggtacgataaaaggcgaagaagcaatcgagatcgtacgggtaga |
| | disease virus | aggtgtgaaccccgagcgcgaggccgaagctcgaacctgagggaaccttctaccgat |
| 586 | Bat Hp- | ttaagcttcggcttgttgcataggaccggaaaggtactatctaccctaactcttgtagttagactctcta |
| | betacoronavirus | aacgaactttaaaactggttgtgtccttcagtagtctgtatggccattggaggcacaccggtaattatc |
| | | aaatactaagaagattcatagtacatccttgtctagcttttggttggcagtgagcctacggtttcgtcc |
| | | gtgtcgctcacaattatccacacagtaggtttcgtccgctgtggttgagttgctagtccgttgctgtttc |
| | | gtcagccatctacaactcgacacc |
| 587 | Basella alba | ggaatatggctaatcggcttattctaatcaaacgcaaaagacttatgacacagaccggacctgaac |
| | endornavirus | gaggtgataaaacacctcgttcaggttcaaaacgtagaagattcattcctccgattagaaatacaact |
| | | acgtctaagcacgatagagatggtatcaagatcggttttagaccacgagaaaatcggcaaatgaaa |
| | | gtacaagttgggtggtttaaattaccaagaacagtaacattcaagaacaacggcaacccgtttgtta |
| | | cctcatttcgtaaattgtttagaagtaacaaagataaattatttaatggtgggaagaacctaagtacag |
| | | taccagccagaagtagtgaaatgacagaaatgtttatgttcatgtccacgctagagggccaattgtc |
| | | aatccaagatcgagatccaaaaataatcaataagtctatatacatgatagaggta |
| 588 | Ball python | ccccttcacccataggcactaggagaacaggataacccctaacggggcatcctgcctgtgaccttt |
| | nidovirus | cagattcgctagttagatatcttcacagactctgctaggcttctgacccagtccgttcccaaagtccgt |
| | | taccgcccgagtagcgcttaggcgcgaaagggacggaagtacctccagtaagcgaaagctgaa |
| | | gtaagggaaatacggcaagactaacttgttagtcttacagtgtggataacctggtagttatccccga |
| | | caagagacctgactcgatgtgaaaacatccaactaggttggcttcaaactagctacaggcaggata |
| | | tcccccaacggggcctccaaggaatcgagaaccaaccctcattccacgtctgtagtaagcaaaaa |
| | | caggggcgatcttcaccgacacctctcaccacagagcacaccaacctctgtgaagccaatttcctc |
| | | gtccaaggacaggttattgagggtcaactttcttccgaccagaagaagggatttcctaccaaaaga |
| | | aaaaccaaatccaccaacaccacaaggtaaaacaacaacttgtgaagccaatacttagtcaaaga |
| | | ctaactattgagggtcaactttctcttcaatagagaagggatttcctggtaaaacaaataacaacaac |
| | | taacatcagcaact |
| 589 | Bat sapelovirus | gacaggtgttttggagggcggatgacgatatctggctggccaccagggaataacggcaaatgtct |
| | | gatcatacggttcacaagtctaccggcgatagtggttcaacaccatgtgtagcagggattcttgcgt |
| | | atgtgaaggcgacagtgc |
| 590 | Bat Picornavirus | taagcggaaagcattcttgtcccccggtcagtaacctataggctgttcccacggctgaaagggtga |
| | 3 | acatccgttacccgcctcagtacttcgagaaacctagtacgcctgatgattccaaattggtatgatcc |
| | | ggtcaaccccagaccagaaactgtggatgggggtcaccattcctagtatggcaacatacaggtgt |
| | | ccccgcgtgtgtcacaggcccttacgggtgccatttcggatgagtctggccgaagagtctattgag |
| | | ctactgttgatacctccggccccctgaatgcggctaatctcaaccccggagccactgggtggtgaa |
| | | ccaaccacttggtggtcgtaatgagcaattctgggacggaaccgactactttggggtgtccgtgttt |
| | | cttttgttcatattaaactgttttatggtcacaacacaacttggtacgatttgtgattattcactgctcactt |
| | | gtcacagtaaatatacacaatcatc |
| 591 | Bat Picornavirus | gggttttacgaaacccgtatacaccagaccttttctcccctccccctccacctaccttttccccctcttt |
| | 2 | ggaccgaaacaaggacacgtaagtggaaacgcgattttatatgtggttggccaccacggaataac |
| | | ggcaattgtctacatgtgggaagtgcaacctccctagccgataacccctgaccgggtgtgtaggat |
| | | aggaaaggtgcccactgtgggcgacaggttatggtagagtggatacctagccaggggcaatggg |
| | | actgctttgcatatccctaatgaagtattgagatttctctgctcattacccggtgatggttgtgtggggg |
| | | gggccccatacactagatccatactgcctgatagggtcgcggctggccgaccataacctgtatagt |
| | | cagttgaattcagccaag |
| 592 | Bat Picornavirus | gaaacccgtatacaccggaccttttctcccctccctctccacttacctttttcccctcttcggcatgaaa |
| | 1 | caaggattattcaagtggaaacgcgatttaatatgcggctggccaccgcggaataacggcaattgt |
| | | gtatctgctggaagccaagcctgcctagccgatagcccttgaccgggtgtgtaggatagcccagg |
| | | aaccagcaatacgcgacaggttatggtagagtagatacctagccaggggcaatgggactgcattg |
| | | catatccctaatgaaccattgagatttctctggtcattacccggtgatggttactagaggggggcctc |
| | | tagtactagatctatactgcctgatagggtcgcggctggccgaccatgacctgtatagtcagttgatt |
| | | tgagcaat |
| 593 | Bat Iflavirus | acgaatcggtatacgcttcggtacctattgttgcaagttcgttccctattttcgatttgcctgcccgaatt |
| | | tgactcaaacaattgtgacatactatgtctctgtttgaaagcactacacgagtttgcgcccagcatgta |
| | | tgttttcaagtcttttgtataagtctgcctctatagtggttttctttgaccttaaagccttgtcaaccatcct |
| | | atatgctgcatcgagacttgatgtcaatctgcctctactacgcaaatgtctagtaattagttataaggtt |
| | | ttactattttccctcatttccaattttagtttgtagtgtatgtgagtatcattcttactccgactgttaagaga |
| | | aaccaatttatagtcgttaaatatgataaatggaatgaatgatggtgtcattttaaaaacactcttctcta |
| | | taggcgtaagcattctcgctcttagagtcgtaaagaagaaatgccgtgtctatcagtatgttatgcga |
| | | tttattttctgccacgcgcttctagtgcaatctagttgacatacagacattgcctaccactcgcgaggg |
| | | tcgaccggtagtgtaaggagtaagtgatgatttccgcttattctgtaccctttgcctggtgaggacag |
| | | atcctgactaattttaaatataaatgaacactagcttccaag |
| 594 | Bat dicibavirus | gtatagcaccggaatggtattttactactccaagtatacgtactaggagttaaaccctgtaatttacag |
| | | gggatttagtgacttttatccgtaaaagtcgattggacgttaatcggtaacgaggccaagtaccgtg |
| | | aaccaatttaaaaacgtattttctcatgtggtagaaccaacttggaaatagcatggcatataggttgttt |
| | | aggg |
| 595 | Betacoronavirus | gataaagtgtgaatcgcttccgtagcatcgcaccctcgatctcttgttagatctaatctaatctaaactt |
| | HKU24 | tataaaaacactaggtccctgctagcctatgcctgagggtttaggcgttgcatactagtgtcttagga |
| | | atttgactgataacacttccctgctaacggcgtgttgcactctcagtctaagcctcccacccatagga |
| | | ggtatc |
| 596 | Betacoronavirus | atttaagtgaatagcttggctatctcacttcccctcgttctcttgcagaactttgattttaacgaacttaaa |
| | England 1 | taaaagccctgttgtttagcgtattgttgcacttgtctggtgggattgtggcattaatttgcctgctcatc |
| | | taggcagtggacatatgctcaacactgggtataattctaattgaatactatttttcagttagagcgtcgt |
| | | gtctcttgtacgtctcggtcacaatacacggtttcgtccggtgcgtggcaattcggggcacatc |
| 597 | Boone | tacgatcgctgtacattccactactgccaattagctcccccttcccgttgctcccctctataaggaga |
| | cardiovirus 1 | gccttctcttgcaaaggtgaagccttcacccccggtcgaagccgcttggaataagacagggttattt |
| | | tctcctctcctcggcgcttgcctcttctaagctgaataggttctatctattcaggcggatggtctggtcc |
| | | gttccttcttggacagagtgtgtatctgggttttccggatctcgaccacacactcaccagagctcagg |
| | | agtgattaagtcaaggcccgatctgcggcgaaaaggaaatgaagtattttgcagctgtagcgacct |
| | | ctcaaggccagcggatttccccacctggtgacaggtgcctctggggccaaaagccacgtgttaat |
| | | agcacccttgagagcggtggtaccccaccaccctgcaaattatggatttgacttagtaactaaaaga |
| | | ttgacttggcatacctcaacctgagcggcggctaaggatgccctgaaggtacccgtgttgaaatcg |
| | | cttcggcgaccatggatctgatcaggggccctgcctggagtggttctatcccacacagcgtagggt |
| | | taaaaaacgtctaaccgccccacaaagaccccggcagggatgccggtttcctttttaccaattcttg |
| | | acact |
| 598 | Breda virus | atcacctagtacttacaagcgggtcaaaccgccctccggaacggtcataaccccctcccgaacgt |
| | | gcgcttgacgtgactggtctttcagtctagctttctgagaaatactccggggttgtaacccaccatttt |
| | | gacctttggtcagtttggtaacactccaaccaaacagcatctgacccacctccagcttgctgcaggc |
| | | catttggacCaaacgggttcagatatcttgtggctaaacctctgacccacctccagtttactgcagg |
| | | ccttttggactaaacgggtAcagactctttgtggttagtttttaactacccactgtttagccgccaacc |
| | | tgatttttattgttacaaaattttgtgtttacacattattttcttacggttggcagtttgtttggttgtttgcaca |
| | | gtttttgctgataccaatttttactgtgcttttggtgttttcggctaaggctgtttttcacatacttagtttgct |
| | | tgaagtaaccttcacaacatctgttttgtttttggtttctaaggtaaagagtttcaggaaaaaacatagg |
| | | cgcccatcttgtggtgtctagttttaattaatctggcaaacaagtatcaagtcatcgactccctttggag |
| | | tgagacttacgagtaccaattcgcctattttggccatccatataaaa |
| 599 | Bovine viral | gtatacgcccagttagttcaggtggacgtgtacgattgggtatcccaaattaataatttggtttaggga |
| | diarrhea virus 3 | ctaaatcccctggcgaaggccgaaacaggttaaccatacctttagtaggacgagcataatggggg |
| | | actagtggtggcagtgagctccctggatcaccgaagccccgagtacggggtagtcgtcaatggtt |
| | | cgacgcatcaaggaatgcctcgagatgccatgtggacgagggcgtgcccacggtgtatcttaacc |
| | | caggcgggggccgcttgggtgaaatagggttgttatacaagcctttgggagtacagcctgatagg |
| | | gtgttgcagagacctgctacaccactagtataaaaactctgctgtacatggcac |
| 600 | Bovine rhinitis A | ttttgcggctctgccgccgttcgggttttacctgttttcacagagcaaaacaggacctctagtttcgtg |
| | virus | cttaaacgagatcatgctcgaactagaactataacgctggtcactggacccgtgccgcgccttgcg |
| | | gatctttgcgggaatggtggctagtgggctgtggaagtgactctaaccacacgcccctcaagtgtg |
| | | ggaaaacacgaactggtgtagcgacgacgataggccttgggacaccctctccagtgatggagac |
| | | ccaaggggccaaaagccacgccttgtgccctgtcgttcacaaccccagtgcagttcgtgccagta |
| | | cctgcttttgggaagtgtgctttggacagctgaaaacagtcctagtgggagactaaggatgcccag |
| | | gaggtacccggaggtaacaagtgacactctggatctgacttggggagagcgggtctgctttacag |
| | | acgccactctttaaaaaacttctatgtctcgtcaggcaccggaggccgggccttttcctttaaaacaa |
| | | tacacttt |
| 601 | Bovine | ttggatctgagcaggggccccctttgggttgctttacaactcaactgggggttaaaaaacgtctaac |
| | picornavirus | ccgacacgccagagggatctggtttccttttatttcttttactcaccactggatgcagattgacgataa |
| | isolate TCH6 | acgttgttgtttgtgactattgacttgatctgcttctacgggtttactttcactgttatacttcttgctttgttt |
| | | ggtgttcactgtactttgtctccttctacatttcaca |
| 602 | Bovine nidovirus | caccaatagattagtcaagctgtctataggcataaactaacccccaaccccattaccccggggcca |
| | TCH5 | ggtgggccgccgccttcgggcaaacccgtgcgctggtataatcaaggttcacagccagattcact |
| | | gccggttagctagtggggcggtagcctggcaaaacccgaagaggttggaaagggaacttcagg |
| | | gtagtttatcctaggctagcgtagctacagttcggtcaagataaccgtcctggtgctagggctagta |
| | | gagacagtggtaacttggacaagggtccagggccactttagggaataccctacggaaggctagg |
| | | tccgtaaggaagacccccgcagttgtccgcggttgagcagagctcctgcgtagacaaaaggcaa |
| | | aaagtggattacattcgcctgcaggaaaaggcaaacgtcgttggagtcggagctaaagtactgga |
| | | cgattgataccacgcctgctgcggtagataaa |
| 603 | Bovine | ccatcgacactccaggctcacggattaagttaggttccgccgaagcgggctaaccaggcccctag |
| | hepacivirus | taggaggcgcctatcccgtgagccctttccccacggattgagtggagctggagctgggaaggac |
| | | cgagtacggtccaatcgagaagaaccctgatgaacattccaggcctcttcggtagatttggatatat |
| | | ccaccagtgaaggcggggtcgtgggtacaggccccctagtccacacagcctgatagggtcctgc |
| | | cgcaggatccgtgggtgcggctgtacatgtacc |
| 604 | Botrytis cinerea | gccccgccgaccttcctatttatttctaaataggaaggtcccgactagtcggataattcggtttaacg |
| | mitovirus 4 RdRp | aattatggttagatctattaaagttaaaatagattgaatttctttctcatcctccttattcctatactttggga |
| | | gtaaatgacaaatgtctatcctcaaaccgaaatggcttaagtgatgaatttgaaagaaaggtaggttt |
| | | taagaatataaggcatcaatatattatacccttgaatgttaagtgaccacggcgtgacgattagggct |
| | | atcttaggatagacagccatctaacgcgacagcagtggaaatcagcttagcatctcaagatcatgta |
| | | taatatatacataaccttacaattataaaaccaaaccaaaacacactataattttatataaattatagaa |
| | | gtatcggacctggacggtacctactattaactgatagtagccaaatgcaggaagctc |
| 605 | Botrytis cinerea | ggaacttttcagttccagaagtggctttattaagccttcaaagtttacactttgaacctgcgattaattcc |
| | mitovirus 2 RdRp | ccatagtgactcttgttactgtgaattaggaatagttgtagttcaacttctaatgaggtgaacaatataa |
| | | taactcatcttattaaccctatacgtagacaattgtccaaagagacagttggaattctgccaatctgga |
| | | atgtttggtacgcgtagaagataataagagaccctctattcccctgcctcatgactaagtcatggccc |
| | | ggggtgtaatagagatacttttatatattatacaatc |
| 606 | Canine | cgctctttatacaaatctgtcaaccctttgtataactctaagccgaacaattatagctaggctttttattat |
| | picodicistrovirus | ataacattaattaggcattagcgttgtcgccaatctcttggtaatcctaaggatacctttcctgttgacta |
| | strain 209 | agatgaagcgccttcggttaccgatgcccggtgtccacgaagccatcgtggtcggccgcgtcccc |
| | | cacctctcccaacttggactccatgttttcagtaggtgtaatgattagtattattgattctgctcgttcaat |
| | | gtgtttatcttcacgatctgggacccaacacatgcttcactcatgtttaaatgttggttccctcattttga |
| | | agacacccaaaccatagagtgcgagaatgaggatttctacttccattctggtaacagaaatgaattc |
| | | ctgcgtgtgtctcgtaaatggaatctttaagaacttcagataaatcgaacaatacactaatacaagttg |
| | | ttttctaccaacatgttcaatgcggctaatctgaccgtggagctgtgaagcgctcaaacccgagtgtt |
| | | gtatacagtcgtaatgcgtaagtccatgaggaaccgactactgttacctctgttggtgtgtttctccttt |
| | | CCtctcttttattattatttgttattgcaaatactacaactttgatcaac |
| 607 | Canine distemper | accagacaaagttggctaaggatagttaaattattgaatattttattaaaaacttagggtcaatgatcct |
| | virus | accttaaagaacaaggctagggttcagacctaccaat |
| 608 | Canine kobuvirus | tttaagtgttgtgcccaatctcttgactcctgctggaaccaccgaccagtagtgtccaaaatgccagg |
| | | tggaaaatcctcccttcccctctgggcttcatgcccggcatcctccccccagcctgacgtgccaca |
| | | ggctgtgcaaagaccccgcgaaagctgccaaaagtggcaattgtgggtcccccctttgtcaaggc |
| | | gtcgagtctttctcccttaaggctagtcctgtcagtgaactctgtcgggcaactagtgacgccactgc |
| | | atgcctccgacctcggccgcggagtgctgccccccaagtcatgcccctgaccacaagttgtgctg |
| | | tctggcaaacattgtctgtgagaatgttccgctgtggctgccaagcctggtaacaggctgccccagt |
| | | gtgcgtaattctcatccagacttcggtctggcaacttgctgttaagacatggcgtaaggggcgtgtg |
| | | ccaacgccctggaacgagtgtccactctaataccccgaggaatgctacgcaggtacccctggctc |
| | | gccagggatctgagcgtaggctaattgtctaagggtattttcatttcccaccctcttcttcttgttcata |
| 609 | Camel | cttaagtgtcttatctatctatagatagaaaagtcgctttttagactttgtgtctactcttctcaactaaac |
| | alphacoronavirus | gaaatttttgctacggccggcatctctgatgctggagtcgtggcgtaattgaaatttcatttgggttgc |
| | | aacagtttggaaataagtgctgtgcgtcctagtctaagggttctgtgttctgtcacgggattccattct |
| | | acaaacgccttactcgaggttctgtctcgtgtttgtgtggaagcaaagttctgtctttgtggaaaccag |
| | | taactgttccta |
| 610 | Cripavirus | gcaaaatcggtagtacgttaaacgtacgaccaccgatgagactgaaatgacactagttgagattatt |
| | | tcaatatcctagtgttataaagtcaatatttgttggttgatcgtttcgtcaatcgatggcgctgacagcc |
| | | ggaaagacggcaataataaaaaccaagatttagtttttaagttttgattgaattgcaaaagctatcttg |
| | | aatagacaatcaaaatattaagtaaagcaaaagcttcttaaagaagacaatatttaattagttagtaac |
| | | caaacctcatcgtgcccctaagggttaaccggttacgtaaaagcgtagaggtattaaggtcactgc |
| | | ggagacctaaaatccgcaattttatgttttgtaatgttttagttatagacttagatgtaactataagagttt |
| | | ataaatacttgtttcaagatttatagacaagatctgatcctatggattttagataaccttcatgttagtgg |
| | | atagtgtgtgtacctatctaaacgcataaggctcttatttcatatttaaagtaggactatgtattacggc |
| | | gcatctaacggtaacgttagtcaagaccggagaatctcggaatgaattttagtaattcccaaatttata |
| 611 | Human | acctttgtgcgcctgttttatatccccaccccgagtaaacgttagaagttacgcaaccccgatcaata |
| | coxsackievirus | gtaggtgtagcactccagctgcatcgagatcaagcacttctgtctccccggaccgagtatcaatag |
| | A2 | actgctaacgcggttgaaggagaaaacgttcgttacccggccaattacttcgagaagcccagtagt |
| | | gccgtgaaagttgcggagtgtttcgctcagcacttcccccgtgtagatcaggctgatgagtcaccg |
| | | cgatccccacaggtgactgtggcggtggctgcgttggcggcctgcctatggggcaacccatagg |
| | | acgctctaatacagacatggtgcgaagagcctattgagctaattggtagtcctccggcccctgaatg |
| | | cggctaatcctaactgcggagcacatgccctcaaaccagggggtggtgtgtcgtaacgggtaact |
| | | ctgcagcggaaccgactactttgggtgtccgtgtttctttttattcttataatggctgcttatggtgacaa |
| | | ttaaagaattgttaccatatagctattggattggccatccggtgactaacaaatcgctcatataccagt |
| | | ttgttggttttgttcccttatcacatacagctcataacaccctcttatatttactacaattgaatagcaaga |
| | | a |
| 612 | Coronavirus | agaaacaagtagtgttttaaaaaccttcaaattagtgcctgtaacatctttgcaatgaaagtagcgctc |
| | AcCoV-JC34 | actagcctctatgcaaagaatgttaaaagaaatacgaagcatttaaagaatacaatctatctaggata |
| | | ggtacaattctcctccccctcttgacttcggtcaactcaactcaactaaacgaaatcccccttgcatg |
| | | gttccgacccgtgtaaggttgtgtatttcgtgcagtcgttgcccttactagtgtaagcgtaacggcatc |
| | | taggtttgcacgtcttggaggaaacggtgtgtacgtttctagtgtttacgccgtatcggttccggccc |
| | | gataggtattgcattagacgtcctgggtggttctgcctgcccttgtgtgattcggctgttccgtcagttt |
| | | ggtcacctcacacgtccttaagac |
| 613 | Chicken | gggtatggtggttaaccccgtccactgggcatctttgccctctcagaagtggatcaatccaccccaa |
| | picornavirus 3 | ctccccccctggttacctgagccacagtggactccggtgacgaagctagggaccccaatacctca |
| | | agtgccaagagagtccccccctcgcgagaggtgctcttgggcccaaaaggctagttggcagagt |
| | | gaagtgaaggaagctgctaacgtggtgaccttaagcgtaattcgaagctgacctttgaggttaacc |
| | | ctagtggaccactggaggaatctgtggaggtggtggttaggaaagttggccacttgtgagtagatg |
| | | cccagaaggcataaggctgatctggggccagtgactataccgttccggtaaacctggtataaaaa |
| | | ccatgaaagcaagtgggtgaaattttctctttttatccttcattcagcagttgatattggcaaa |
| 614 | Chicken | gtggccgacttgcagaacttcctaccgaaccaccacctcacccccataactccttccctctacacct |
| | picornavirus 1 | tccgctatggtggttaccactgctttattgccttgactgagaatggccaccccctcgacacctgcccc |
| | | ctactgccccaccgcgcaaccttttgcttgtccactcggttggagaggcatgggggccccgttcat |
| | | atccccagtccagttggtgaccttccccctccccgtccggtagatggtccagagggctttgccgac |
| | | gccctctatgatgcttgcttgtctttcctccgtcagcgcgagcatgcacttgtcgagcccacggaaa |
| | | cacagcctagcttttgcttctctcaccctgcgtaccctgggcgccttccgctcgagattcgctttgttc |
| | | gacaccctggcgtccccccaccgctacgtgattttactcgtggcatacaccgccctggcgttcagt |
| | | acattccactgcctaatttgggtggcctccctcaatctcccgcaccccccattgcgcacgtcatcac |
| | | cgccgccgctaacgcgatccggcgcggttctcactggcactgtcccctcgtccgccgggtttcca |
| | | ctcatggttggcttttcacttattctggttactggtgttccatcctacttcatgatggtcgccatgaccat |
| | | gac |
| 615 | Chicken orivirus | aaaccctcacgagtgcttgtggtaggtcccaggccaatattcttcgtaaggcttggttccaattttcca |
| | 1 | ccactcgtgtttgggttctggcctatggtacccagaggggcggtttgggggaattaactccccctcc |
| | | cctgtggtcctataccaccccacacctctgtgggctttctttactatcttcttgttttccgacttttaaaca |
| | | ctaggcaggcgcgcctagtcatacaccgcccggctggtctttccagctcttgtgggcggtgcgcg |
| | | ctggtccatcgtgcccagcgacatagcaccttgtggacacctccgaacgccctcccctgtatggg |
| | | gtggtgcccaggggtttcagtgtggtgacacactccctggggcccgaaaggctagtgtgcaacag |
| | | gtgaggtacagccagctgcccccgtggctggagggaccaagcttgtgaagcacacctcaccttct |
| | | tggggggggctagtaagtggtgaaagcatagtgtccgtgtcgctggccaacactttgggtcaagt |
| | | ccagccactcagtgagtagatgcccaggaggtacccctagtggatctgacttggggcctgttactt |
| | | aatgcaggttaaaaactatgaaagctgagtagtgtagcccggctggtggcttctcttccttattcattc |
| | | tatttt |
| 616 | Chicken | ggttaacttgtttaaccaaggcttccgtgcagggcttgcacgttaggagttcatgttgattcatgctcc |
| | gallivirus 1 | aatgcccaaaactttgtgtgtttgtttatgtctttcccaaagtttcccccaaggtttcggtactcaaacct |
| | | taattcctagtcccatcttttgggccttagtatctaggaaatgtacccgtgccttgacgaacgtaagaa |
| | | agctgtcttttattgaacggttctaatgaactaagtataactggctcgcgccacctggtgtgtgccgtt |
| | | ggaattcccccatggtaacatggtccaacgggcccgaaaggctagtgggcaatcggtcctccaa |
| | | ggaaggggttcccaccccgacctgaacaggatttgatgaagctcacctcccaggctcctaacccc |
| | | aaggaagtttacttatagtaattagaatttagtatgtaattgctggcaatcttgctagtagtcaggaacg |
| | | ttatgaccaaatgagtagacccccagaaggtaccccattatatgggatctgatctgggcctcatact |
| | | gtgtgtctccccacatatgaggttaaaaccatgaaagtttggtccaaaatattcttttccttttatcttttct |
| | | ttagtggtgacgccattatatcagcagtttgctg |
| 617 | Chicken | ggtgcatcatcactgaacaccctcgggcagagatgcaagggtggaagtcactcctgccccctgg |
| | calicivirus | caacatgcaggtgcccgatcccaagcttagttctgacttcctctcctgggtggtgcaacactccaag |
| | | gttgatgaacaaacctggagggacctctgggcaacctggtctctcgaggatctccggcgcatctcc |
| | | acagactacctcatgctcccggaacctgagaagaacactgatgcctatgatggctggctgatggtc |
| | | ggcgagatgttgacctttgccggtctcattggctgggagg |
| 618 | Carp picornavirus | agctacaggaaagagagagataatcacagcacataaatacaactacagaagagagcctttccctg |
| | 1 | agcactatttacagcaaaccacgctgggaaaagtggtagcatgacccacttacgggttacttagtat |
| | | aggattttaatatcttcgattctttattttcttttcttaactaagttcgcccggactttatccgtgttttatttta |
| | | gtttaagcaaaattgagtaactaagtttttaacctgccaaatggtgagaagtaactctgtgaaaatacc |
| | | atttgtgcatgaaattgtcttgaaaactcttaggcttttggggggtcccactgctgtttggaggactatt |
| | | gacagactctattgtagttgagtagtgactaatgataacgatttgcgtattacgcaatgggctgtacc |
| | | cgttagatttagtatgccggggggaggggtcccactggattgcactatgtaacctgacagggcgtc |
| | | tgccgacgcactacaatgaggataagatcggctgtttttattt |
| 619 | Falcon | cgcttggaataagttgagaggaattatgcatgctagttgtgtttgtttacaactaattgttctaatccaa |
| | picornavirus | gtgaagctcttcgcttggggcggcacgacacttgccgtaattcttctaccgtccctccacaccttgtg |
| | | gatgaagggccggatgtgtggcctctggctaacccctctctctggggtgatgctactggatgtttta |
| | | ctcctagaccaaatcacatgaactcctcttgatccacttcggtggggctatgagcctgcggattaata |
| | | gctggcgacagctaccccaggggccaaaagccacggtgttagcagcaccctcatagtctgatgc |
| | | ccaagggctgatgttgggagctagtagtgtgtgtctggcctatgtttaggacttctggccaagcgca |
| | | gaggagtggggctgaaggatgcccagaaggtacccgtaggtaaccttaagagactatggatctg |
| | | atctggggccccctcacgtggctttaccacgtgttgggggttaaaaaacgtctaggccccaccagc |
| | | ccacgggagtgggctttcccttaaaaagcccaacaatatttatggtgacaattcactgtttcttctttgc |
| | | aatttttgtattcttggactccttattttttgtttgcttgattttagtggacattcagattcaaatacaaa |
| 620 | Equine rhinitis B | cgacaggcacaggtcgctccgagttctagtagtgtgggaacttgttactactgatgaaacgaggta |
| | virus 1 | gtgacactcagtacctgcgaacgaggtcggggccctcccttcttccttcacccaactttcacttttcgt |
| | | tccactttagcaggggtcttctttctatccccctggcggcattggaactagccgtcgcgtcttaacgc |
| | | gcagccctgaaggccccacaccttgtggatcttgccgtgggtatgtttctggcatgtgtttctcaagc |
| | | ctgcaaccgaagccgaacagccacatgaacagtttgagcgtggtagcgctgtgtgagttggcggt |
| | | ggatccccctcgtggtaacacgagcccccgtggccaaaagcccagtgtttacagcacctctcaca |
| | | tccaggacgaccccatcctggcgctcactcttagtagtatggcttagtacgcattaggtggtaagcc |
| | | gagctctccctcggccttgttctgaatgcacacatgtctaggggctaaggatgtcctacaggtaccc |
| | | gcacgtaaccttcagagagtgcggatctgagtaggagaccgtggtgcactgctttacagatgcag |
| | | cccggtttaaaaagcgtctatgcccctacagggtagcggtgggccgcgccctttccttttaaaacta |
| | | cttgttct |
| 621 | Equine rhinitis A | aagggttactgctcgtaatgagagcacatgacattttgccaagatttcctggcaattgtcacgggag |
| | virus | agaggagcccgttctcgggcacttttctctcaaacaatgttggcgcgcctcggcgcgcccccccttt |
| | | ttcagccccctgtcattgactggtcgaaggcgctcgcaataagactggtcgttgcttggcttttctatt |
| | | gtttcaggctttagcgcgcccttgcgcggcgggccgtcaagcccgtgtgctgtacagcaccaggt |
| | | aaccggacagcggcttgctggattttcccggtgccattgctctggatggtgtcaccaagctggcag |
| | | atgcggagtgaaccttacgaagcgacacacctgtggtagcgctgcccagaagggagcggagct |
| | | cccccgccgcgaggcggtcctctctggccaaaagcccagcgttaatagcgccttctgggatgca |
| | | ggaaccccacctgccaggtgtgaagtggactaagtggatctccaatttggcctgttctgaactacac |
| | | catctactgctgtgaagaatgtcctgaaggcaagctggttacagccctgatcaggagccccgctcg |
| | | tgactctcgatcgacgcggggtcaaaaactgtctaagcagcagcagaaacgcgggagcgtttcttt |
| | | ttcctcatttgtttc |
| 622 | Equine arteritis | gctcgaagtgtgtatggtgccatatacggctcaccaccatatacactgcaagaattactattcttgtg |
| | virus | ggcccctctcggtaaatcctagagggctttcctctcgttattgcgagattcgtcgttagataacggca |
| | | agttccctttcttactatcctattttcatcttgtggcttgacgggtcactgccatcgtcgtcgatctctatc |
| | | aactacccttgcgact |
| 623 | Enterovirus sp. | actctggtatcacggtacctttgcacgcctattttataccccttccccatcgtaacttagaagcaacaa |
| | isolate CPML | acaaactgcccaatagcagcacaacacccagttgtgttaggggcaagcacttctgtttccccggaa |
| | | gggtctgacggtatgctgtacccacggcagaagtatgacctaccgttaaccggccatgtacttcga |
| | | gaagcctagtaccattatgaaggttgattgatgttacgctccccagcaaccccagctggtagttctg |
| | | gtcgatgagtctcggcattccccacgggcgaccgtggccgaggctgcgttggcggccagcctac |
| | | accatacggtgtaggacgtcaagatactgacatggtgtgaagagcctattgagctacgtggtagtc |
| | | ctccggcccctgaatgcggctaatcctaactccggagcatccgccagtaagcccactggaagggt |
| | | gtcgtaatgcgaaagtctggagcggaaccgactactttgggtgtccgtgtttcctgttttacttattgtt |
| | | tggctgcttatggtgacaacttatagttatcatcataagctacttggtcttgccaaccggagaattattt |
| | | ggttatttgttggtttcataaacctacagtcgtattttcctgtcttattaattgttctcaaaattaacaaca |
| 624 | Enterovirus | taccgctgcaccagtgagctggtacgctagtaccttcgcacggagtagatggcatcccccacccc |
| | AN12 | gtaacttagaagcaaagtacacatctggccaatagtggcgctgcatccagccgcgcaacggtcaa |
| | | gcacttctgtttccccggtccgcaagggtcgttatccgcccagtccactacggaaagcctactaacc |
| | | attgaagctatcgagaggttgcgctcggccacgaccccggtggtagctctgagtgatggggctcg |
| | | caaacacccccgtggtaacacggatgcttgcccgcgcgtgcactcgggttcagcctattggttgtt |
| | | cacctcaacatagtgtaaatggccaagagcctactgtgctggattggttttcctccggagccgtgaa |
| | | tgctgctaatcccaacctccgagcgtgtgcgcacaatccagtgttgctacgtcgtaacgcgtaagtt |
| | | ggaggcggaacagactactttcggtactccgtgtttcttttgttttattttgaattttatggtgacaattgc |
| | | tgagatttgcgaattagcgactctaccgctgaacattgccctgtactacctaatcgcatttcacaaaa |
| | | cctcagagataccaagctcttacattgatctgcttgttttcctgaatctcaaatataaattggaacaagc |
| | | aaa |
| 625 | Dolphin | accagacaaagctggctaggggtagaataacagataatgataaattatcatacttaggattaatgat |
| | morbillivirus | cctatcaattggcacaggatttggataaaggttcacagtc |
| 626 | Dianke virus | tgttttcaaccataatactactactacaagtataaaaccccgtccgtctgtcggagacgctaaactctg |
| | | accaccaatctagccacatcagttgcttaaagaacctcttgagacactctcccacttaacatcttttag |
| | | gaatcttcgatgctacaacaacttggctagtgaacaataaatccgtacaattcacagttgtaagagg |
| | | ccataggtccagactttgaaaggtttgtttctattgttacaaatacttagattaacagaggctatttaata |
| | | gtgctcatcacgttaacagagtaaccttgtgcaatagtatgagcttgttgtaaaacgtcttgatacgac |
| | | acc |
| 627 | Guereza | cactcaatactacactccgcatttggggagaagcgctggcgttcgcggaaccgcgttaaccatac |
| | hepacivirus | gcgtagtacgagtgcgacagaccccggtgctactggtggtagcgagacacgagccgaagtctgt |
| | | ggggggaactccacttagagggcatgcccgggcgtaggcttctgagttgggatgggccccaact |
| | | tggcccctgagtgggggggtgttacgacctgatagggtgcgggctggcgcctaccactttccagt |
| | | cgtacatgagtc |
| 628 | Grapevine | gcccggggggtgcagtcctgtgaaagggtctgcaccatactatatatgtatatgattacatcccaaa |
| | associated | aggcgacttcgttcaggttttaaatctgacgtaggtccagtaaataagcatgtcaaaacatgtaagttt |
| | narnavirus-1 | atcctgtaatctactctcataagatgagataagatgatattgcagttcccatgtaaataaatccattatg |
| | | aattcattcatataaggtagaagtggtaactatggttgaaacattaatataaaacggtcattttgcatga |
| | | acgtcattaaggaactggcataccaatgtctatttagtgactatgatatttagagtatcccttatattaat |
| | | taacaattattccttttagcatatcatccgacaacaaattttaaaagaagaaatattactcattaaaa |
| 629 | Goat torovirus | gtacttacaagcgggttaaaccgccctccggaacggttacaaccccctcccgaacgtgcgcttga |
| | | cgtgactggttctcagtctggctttctgagaaatactccagggttgtatcccaccatcttgacctctgg |
| | | tcattttggtaacaccataaccaaacaaactctacacacctaacccacctccagcttgctgcaggcc |
| | | ttttggactaaacgggtttaggtgttttgtgaccaactcgtctacccacctccagttttactgcaggcct |
| | | ttttggactaaacggCtttagacttttgtggttagtttttaactacccactgtttagccgccaacctgatt |
| | | ttcattgttgtaaaattttgtgtttatacactattttcatacggttggcagtttgtttggttgtttgcacagttt |
| | | ttgttgataccaatttttactgtgcttttagtgtattctgctaaggctgtattttacatacttagtttggttga |
| | | agcaatttttacaacatttatattgtttttgatttctaaggtaaagagtcttaggaaacaccatagacgcc |
| | | attcttgtggtgtctagttccaactaatctggcaaacaagtaccaagtcattgactcactttggagtga |
| | | gacttacgagtaccaatttgcctatttcggacatccatataaag |
| 630 | Foot-and-mouth | acaagcttgacaccgcctgtcccggcgttaaagggaagtaaccacaagcttacaaccgcctaccc |
| | disease virus O | cggtgttaatgggatgtaaccacaagatacaccttcacccggaagtaaaacggcaaattcacaca |
| | isolate | gttttgcccgtttttcatgagaaacgggacgtctgcgcacgaaacgcgccgtcgcttgaggaggac |
| | | ttgtacaaacacgatctaaacaggtttccccaactgacatacaccgtgcaatttgaaactccgcctg |
| | | gtctttccaggtctagaggggtaacactttgtactgtgcttgactccacgctcggtccactggcgagt |
| | | gttagtaacagcactggtgcttcgtagcggagcatggtggccgtgggaactcctccttggtaacaa |
| | | ggacccacggggccgaaagccacgtcctgacggacccaccatgtgtgcaaccccagcacggc |
| | | aacttttctgtgaaactcactctaaggtgacactgatactggtattcaagtactggtgacaggctaag |
| | | gatgcccttcaggtaccccgaggtaacacgcgacactcgggatctgagaaggggactggggctt |
| | | ctgtaaaagcgcccagtttaaaaagcttctatgcctggataggtgaccggaggccggcgcctttcc |
| | | attataactactgacttt |
| 631 | Feline infectious | acttttaaagtaaagtgagtgtagcgtggctataactcttcttttactttaactagccttgtgctagatttg |
| | peritonitis virus | tcttcggacaccaactcgaactaaacgaaatatttgtctctctatgaaaccatagaagacaagcgttg |
| | | attatttcaccagtttggcaatcactcctaggaacggggttgagagaacggcgcaccagggttccg |
| | | tccctgtttggtaagtcgtctagtattagctgcggcggttccgcccgtcgtagttgggtagaccgggt |
| | | tccgtcctgtgatctccctcgccggccgccaggaga |
| 632 | Farmington virus | acgacgcataagcagagaaacataagagactatgttcatagtcaccctgtattcattattgacttttat |
| | | gacctattattagacccttcacgggtaaatccttctccttgcagttctcgccaagtacctccaaagtca |
| | | gaacg |
| 633 | Avian infectious | acttaagatagatattaatatatatctattacactagccttgcgctagatttttaacttaacaaaacggac |
| | bronchitis virus | ttaaatacctacagctggtcctcataggtgttccattgcagtgcactttagtgccctggatggcacctg |
| | | gccacctgtcaggtttttgttattaaaatcttattgttgctggtatcactgcttgttttgccgtgtctcacttt |
| | | atacatctgttgcttgggctacctagtgtccagcgtcctacgggcgtcgtggctggttcgagtgcga |
| | | ggaacctctggttcatctagcggtaggcgggtgtgtggaagtagcacttcagacgtaccggttctgt |
| | | tgtgtgaaatacggggtcacctccccccacatacctctaagggcttttgagcctagcgttgggctac |
| | | gttctcgcataaggtcggctatacgacgtttgtagggggtagtgccaaacaacccctgaggtgaca |
| | | ggttctggtggtgtttagtgagcagacatacaatagacagtgacaac |
| 634 | Human | ttaaaactgggtgtgggttgttcccacccacaccacccaatgggtgttgtactctgttattccggtaac |
| | rhinovirus 1 | tttgtacgccagtttttccctcccctccccatccttttacgtaacttagaagttttaaatacaagaccaat |
| | | agtaggcaactctccaggttgtctaaggtcaagcacttctgtttccccggttgatgttgatatgctcca |
| | | acagggcaaaaacaacagataccgttatccgcaaagtgcctacacagagcttagtaggattctga |
| | | aagatctttggttggtcgttcagctgcatacccagcagtagaccttgcagatgaggctggacattcc |
| | | ccactggtaacagtggtccagcctgcgtggctgcctgcgcacctctcatgaggtgtgaagccaaa |
| | | gatcggacagggtgtgaagagccgcgtgtgctcactttgagtcctccggcccctgaatgcggcta |
| | | accttaaacctgcagccatggctcataagccaatgagtttatggtcgtaacgagtaattgcgggatg |
| | | ggaccgactactttgggtgtccgtgtttcactttttcctttattaattgcttatggtgacaatatatatattg |
| | | atatatattggcatc |
| 635 | EV22 | ccttataacccgacttgctgagcttctataggaaaaaaccctttcccagccttggggggctggtcaa |
| | | taaaaacccccatagtaaccaacacctaagacaatttgatcaaccctatgcctggtccccactattc |
| | | gaaggcaacttgcaataagaagagtggaacaaggatgcttaaagcatagtgtaaatgatcttttcta |
| | | acctgtattatgtacagggtggcagatggcgtgccataaatctattagtgggataccacgcttgtgg |
| | | accttatgcccacacagccatcctctagtaagtttgtaaaatgtctggtgagatgtgggaacttattgg |
| | | aaacaacaatttgcttaatagcatcctagtgccagcggaacaacatctggtaacagatgcctctggg |
| | | gccaaaagccaaggtttgacagacccattaggattggtttcaaaacctgaattgttgtggaagatatt |
| | | cagtacctatcaatctggtagtggtgcaaacactagttgtaaggcccacgaaggatgcccagaag |
| | | gtacccgcaggtaacaagagacactgtggatctgatctggggccaactacctctatcaggtgagtt |
| | | agttaaaaaacgtctagtgggccaaacccaggggggatccctggtttccttttattgttaatattgaca |
| | | tt |
| 636 | Human TMEV- | tccgacgtggttggaattaacatcttttccgacgaaagtgctattatgcctccccgattgtgtgatgctt |
| | like cardiovirus | tctgccctgctgggcggagcgtcctcgggttgagaaaccttgaatcttttcctttggagccttggctc |
| | | ccccggtctaagccgcttggaatatgacagggttattttccaaactctttatttctactttcatgggttct |
| | | atccatgaaaagggtatgtgttgccccttccttctttggagaatctgcgcggcggtctttccgtctctc |
| | | aacaggcgtggatgcaacatgccggaaacggtgaagaaaacagttttctgtggaaatttagagtg |
| | | gacatcgaaacagctgtagcgacctcacagtagcagcggattcccctcttggcgacaagagcctc |
| | | tgcggccaaaagccccgtggataagatccactgctgtgagcggtgcaaccccagcaccctggttc |
| | | gatggccattctctatggaaccagaaaatggttttctcaagccctccggtagagaagccaagaatgt |
| | | cctgaaggtaccccgcgcgcgggatctgatcaggagaccaattggcagtgctttacgctgccactt |
| | | tggtttaaaaactgtcacagcttctccaaaccaagtggtcttggttttccaattttgttgactgacaat |
| 637 | Human | acttaagtaccttatctatctacagatagaaaagttgctttttagactttgtgtctacttttctcaactaaac |
| | coronavirus 229E | gaaatttttgctatggccggcatctttgatgctggagtcgtagtgtaattgaaatttcatttgggttgca |
| | | acagtttggaagcaagtgctgtgtgtcctagtctaagggtttcgtgttccgtcacgagattccattcta |
| | | caaacgccttactcgaggttccgtctcgtgtttgtgtggaagcaaagttctgtctttgtggaaaccagt |
| | | aactgttccta |
| 638 | Hubei zhaovirus- | gtgcaggatggcctttcccatcttaagtggtttgtaggatttcgtgggtccataccccccgatttcttg |
| | like virus 1 | gtacgtattccatgcacggagaatacgaccaaaactcttatttcaaaaaatattattttttactcttgtgg |
| | | gctgagtgcgacccaccagttccagcttagcaacctggaagttgttggagatttatggaaccaaatt |
| | | acacatgcgtggagtgccgccactccgtatctgttcactcattacgcgattaagttctgcgacgaga |
| | | cgagcgaa |
| 639 | Hubei tombus- | ggaccatccaggcaggtgtaggctagtaccctcacctgacctgtcgcgatgtttggctttgtgagg |
| | like virus 9 | cttgtgggaggatcccttggcccatgcattgctgctgtcatcgtgaaaaatgttgtatgctcgcacct |
| | | ggcgtggaggaaacggcatttgacggatgctaaggaggatttgaaggtcctcaactcccatgcctt |
| | | attacaagtcccctttccttcaagcttcgagcccacgtctgtgacgagcagaggtgaggttggagtc |
| | | aagaggagtcctattcaagctgttcgcagcaagaaccataaaactttcattgctcaatgggcaaga |
| | | gcggctaaggctcggttctcgtttgcacgacagtgtgagcggagccctgtaaatgtcgcggccctt |
| | | catcggtggtttgcatcggagtttaagaaaattggcatgaacttgctccaggtttcgtacgtgatcgat |
| | | gaggttgttgaacttagtttggaaccaacgtatgagcgtatggtgtccgaaactaagaagcaattcc |
| | | gtcatcgggcacgtatggaatactacaacgagaaaaaatgccttgaaaagatccactaggaacgc |
| 640 | Hubei tombus- | ttcgggtttacccgcgtaagcggccacactgactggttgtcggtgttgaatttgtataccagatgagg |
| | like virus 32 | agacgttaccaccgtctcggcagtgctacgtctgggaaaggactgtgatagtggacagtcctacc |
| | | gtctttagatacattgcgttgtgtatagcccgggagggattaactaatagcaacgcaatgcacacgg |
| | | cggttcggatttgcttgactgatggaaagacatctaagttctaattgaacc |
| 641 | Hubei sobemo- | gagatgtttgcgtgggccgttgcgctgcgggcggcccacctccctacggggaccgtgagacacc |
| | like virus 3 | gctggggaaggcccccacccccggccaaggggatcctgccgagaggcaggagaaagaggcc |
| | | cagccctctggggcgcctttaggggTgcctgggagggaagtacccgagccgggcggccggtc |
| | | gggtgcggctgtgcagttcgaggctaaccgtaaggaaggcctgagctgcctcggcttgtcggaa |
| | | aggaagacgaaggcacttatcaaggctttcaggaagcaggagcgcaattacagcgcgcgccgt |
| | | gcggcctggattaaccgcatttggccg |
| 642 | Hubei picorna- | agcaacttctttctgaaaactagctagagttcgacgatctctctggctaatgacaaataaccaatcaa |
| | like virus 2 | aaagtcaaatgttcatgtatatatatatttagtagtgacctttatttagaaaaactttagatgatttatcgtc |
| | | aagttgccctttgtgaagcgatcagctttttatatcgtttcatttttgtatacgtcttaattgacgttgtaag |
| | | tacgttttgcatacctcacattgaggatagtatcgtttcctgactaagaagttaaactagtctaccaata |
| | | gcaaccatataggatatagctttgtttttaacaaggtttaatctgatcttatgctcttgcttacggtgtttta |
| | | tgtatagaaaaGtttttataaaaactacataattgtcaaaagaaaaagcgttacgtactgacgcattta |
| | | tgttcacagtgtgacacaaaccttctatattttgattgtaaaataggctttgcctgaccatttatcaaata |
| | | caaactgtttcaaacgcctctccgagccatattggccgacgcgaatcgacataacagggtgagttt |
| | | acagctgcagttgcagccgaggatccacttatttgagagagaattactcttaacgaaattttgaagtc |
| | | acttctacacagttaagtctgagtaggcgttatccaaacgtaaa |
| 643 | Hepacivirus P | acatgggggggggctgacagtgagtacactgtgccaagcaggtgctacgctatgcctaggtgct |
| | | gctgtaggccaaggacatgtcccagtcatcccaggtgagggggggggttcccctcaccgctgcc |
| | | actgcctgatagggtcctgccggagggtctcggtgtccggctgtac |
| 644 | Harrier | gatgtgtgacggtgtaattactttccggatcccactttcctattataactctttcatcccaaggttaggg |
| | picornavirus 1 | aaagaacctggctcggtaccaccagaccctccgccacgctagtggactctccggagataacggt |
| | | accccctttgtagtcacctgtgctggtgaagaaccacctagtattgcttgggtgcgtgccgcctagct |
| | | tccatttcttctggagcactgtgcaatgaggtttccccacttggtaacaagtgcctcaggtcccgcaa |
| | | ggatactgtggggtggtgtgaccgcagggagctgtctccacggctcctctaatgttacgccgctat |
| | | ccacaggccagtgcgtgtcatcgatcccggatgacagagctagtattgcgaacccccaagtaaga |
| | | aaagtggctagtaacctgatagctggtgaagagggtgggtcagttgagtagatgccctagaggta |
| | | cccgaaaggatctgactagggacccgtgactatacattaggtaaaccgggtataaaaaccatgaa |
| | | aaactgaccacttttcttttaacctcttctttctttttatgtgtgttaagtgttttgagtttggactgtaccttg |
| | | cccgcctttcttggattttctctatcgctcttcttacacctactgttatcaaggcactctttagagata |
| 645 | Kunsagivirus 1 | tttcaaatcggactccggtagttataccggagcccggtttggacgcttgggccgcgttaacagccc |
| | | cccacccctttcccactgactgatttctcggattggactcatttgcattgctaactctgattctggatttc |
| | | cccgtttatgtcgtcgcggtcggaagtgcacgtacttcgacgttgatctgatggcgtttgtttccagg |
| | | ggggaggtggcggcagaaacgcccccgccgtaaacttcgggggccacgcctgtcaagccact |
| | | ccctggggccgagcgcctgaggtgatacagagagataagcacactgggcgctgacaacgcccg |
| | | ggacctcagtgagaagagcagtagggccgtgtttatgggactccattggatatcccccgcttgtcg |
| | | gaactcacggctactccgggttgggaagcccgcgactggtactgtactgggtgatagcctggtgc |
| | | cttccctctcactgttgtatgaaggctgaaaaccccct |
| 646 | Kagoshima-2-24- | tatagtttgcctgtttctcgcaccgttaccgctcgttcgggaatgtgaaactggcacccctcctctccc |
| | KoV | ctaccaccctttctccttcgcccccattcataatttacaacgccgcacacagcggggccgccaag |
| | | ggctagcctggcggttataaaaggaacctgggtctttccctcttcaagccaaaaggtaggttccctg |
| | | tgtccctgaatgctcggtgaggaatgctgcaccgtaacgctttgtgaagtgtttgcaagttctggccc |
| | | ggcaagcctacagagtgctgtgatccgctgcggacgccatcctggtaacaggacccccagtgtg |
| | | cgcaacagtatgttcagacttcggtttgttcacttgctttcatggaccattgcgcgaaagtgcgtgcg |
| | | ccatatccctgtacttcaggtgtgcttctctggaccctaggaatgctgcgaaggtaccccgtttcggc |
| | | gggatctgatcgcaggctaattgtctatgggttcagtttcctttttctttactccacaattgactgcttaa |
| | | ctgactctggatcttgtgcttccactgctctttctgctctcaaaacggcttcacttaccaactctcacctt |
| | | tcgaccaacaccatttacacactaacttttttcgactcttctgactcctggcttggtgaagac |
| 647 | Kashmir bee | tacgtacaattttgacgcttcgttcatgcaacaatgaactcacatgtggcgctcggtagtaaccagag |
| | virus | gggcgtcattcccccgtatggagtggagaatataagctaccgactcgagctgtagaataattcagc |
| | | aacttataacgaacacgaattttagtcgacgaaaccattttagcctttaattctatgatttgattataatg |
| | | ataaacagctcatgtaactgtctaaactacataaatacaactggattacgaacctttaagtaactatctt |
| | | agatgaagtctagtagtctcccaatatttccgtgaaaagaatgagggacgagatagctctatttaaa |
| | | gacgtgaggctttaaattctgataaatacattacctgagaattcctcctttaggagttagaatttgaaaa |
| | | gattagtacctatacttaatagaatttaaatatgttaataatgctgaagacaagtatttcgattattaacct |
| | | ctatatttctatataaagtatctgtgagtctcagtggacatcacagtaaggtcgcagttaacttgtaatc |
| | | ttttcattcctgtgtcggagcagtggtaatggagccggacgatttcgccaaaac |
| 648 | Jingmen picorna- | tgtgtttttgtcaagataattgttctgtgattaacagtgattgtggttcgtgtaatgcgacgcagtcaaat |
| | like virus | gctagttttgatgaagtgtatgagagagtggaaaacttatctcataagaagattgaagagtgtgtaga |
| | | tcaggctattgatcgagcttctaagcttcgtgattacaagcttaatgttcacaatggctcccgacggg |
| | | aatcatctgatcctctctttatttcgccccattcgttgttatcgcttggggtatctaagtttgttgcgtttga |
| | | gcagcatcacagtttcgcttcagttgagtctctgaagttgcttgctctgtct |
| 649 | Mumps virus | accaaggggaaaatgaagatgggatgttggtagaacaaatagtgtaagaaacagtaagcccgga |
| | | agtggtgttttgcgatttcgaggccgggctcgatcctcacctttcattgtcgataggggacattttgac |
| | | actacctggaaa |
| 650 | Mouse Mosavirus | gaagttgatcatgaacttggttattggtggaacgcacatgaactcccaacaatgatcttgaagacac |
| | | agcgtggtaacaattaccatgcccttgtggctgcccaagacattgatggctattgggtgatttatgat |
| | | gac |
| 651 | Miniopterus | gttgtcgacccgttgcttggtttaagcatgaggtggattcccccgattatgtctacccgttactatggc |
| | schreibersii | gggcggtcgtttcagggtgtttctactgaggactgcaccaagtctttatcttttattctcagatctccgg |
| | picornavirus 1 | ctgtttgacgcttgtaggacagcaggactattttctcttaatctttttctacccactagggtcctatccta |
| | | gtggagggagggtgccaccccttctctctttagagagtgcgcctggcggtctttccgtctctggaaa |
| | | aaggagcacatggcatgctacaattggcacaagaaaacaagctttgcggattctttctttgtactaga |
| | | ggaagctgtagcgaccctgtatggcgagcggactcccctctcggcgacgagagcctctcgggcc |
| | | aaaagccaagtgttaatagcacccatacaggggcagtaccccactgccctttctcaacatacaat |
| | | gactgatgaaccactgttggtttttctgacacctttgtagtaggattccaaggaatgtcctgaaggtac |
| | | cctgttagcttacgcgcaggatctgatcaggagtctctttacagtgctgtacactgtgcaagggatta |
| | | aaaattgtttgaggaatccccgagatagtggtctatctcttcctattttgttttacagacacg |
| 652 | Linda virus | gtatagcagcagtagctcaaggctgctatacgattggacataccaaattccaattggtgttagggac |
| | | cacctaggtgaaggccgacgacaggtagccattcctgttagtaggacgaaccgttatggtggact |
| | | ggttgctcaggtgagcaggctgcaatgcgtaagtggtgagtacaccacagccgtcaaaggtgcc |
| | | actggtaaggatcacccactggcgatgccttgtggacgggggcgtgcccaacgcaatgttagcg |
| | | gtggcgggggctgccatcgtgaaagctaggtcttgatggaccttgttgcctgtacagtctgatagg |
| | | atgccggcggatgccctgtgacagccagtataaagaatatccgttgtgattgcac |
| 653 | Lesavirus 2 | tctttctttattttcttatgtaactcttctttttaagttttattttgcctacttgtgagcttatgcgggaccactg |
| | | tcttagacaaccccacatttgtcatgagtaagtacacgcaaccattacgattactttttaaccgtctga |
| | | ccttttgataacaactgaagttaggcgtgaaacatgcatttataccaaagtagccccgcatttcccca |
| | | ctacggtgggggggctaccctactggctttggaactgtagccattatgtgttgcctggctttcaggat |
| | | ctcacaacacaacagttctctcacaatggaatatgggtgagattgcagtgacatgaacaagtatcta |
| | | gtagtacatagactcaagcctagttgcctgcggaacaacatgtggtaacacatgccccagggtcca |
| | | aaagacaagggttaacagccccttctaggtgtctgtgtgtgaagaatactttagtagtgttgttatgat |
| | | ctcacctgttagtacagaatgagtatggcttggtgaaggatgtcctacaggtacccattatatggatc |
| | | tgagtaggagaccactagtggtggctttaccgccaggtgagtggtttaaaaagcgtctagccaagc |
| | | caacagcactagggatagtgctttctatattttatattttcagtgtatatggtgacaa |
| 654 | Lesavirus 1 | gtaactaataagcaagttttactgcctgcaaactgcttcaatgggaccaccgcttcggcgaccccttt |
| | | gttgagtttgtatgtttttaagtaatctttgcaaccatacgattattttagccgcctctctataatgatcttgt |
| | | tatagtgggacgtgaaacattggtttttctcacacacgtccggtcacccgggcgtgtgttcttccgta |
| | | agtcctatccacataccatcgtgggtaggccagcatgtttgcacaggctgtgacagtgtgggggg |
| | | ctttccacctctcaacaacacactgaattgcaatgcactcacggaggaaatgacaatttggttatagt |
| | | tttgaactgtgctagtaattttttcacattaagccatgttgcctgcggaatcacatgtggtaacacatg |
| | | cctcagggcccaaaaggcacgggttagcagccccttcatggtgtgttagaagtgaaaacacatag |
| | | tatgagctataatatctttgttgtcttctctgtagtgtaccccgccaaatgtaaggatgcccagcaggt |
| | | acccattttatggatctgagctggggattgatagtgtatctataaatgcactgatcaatttaaaaagcg |
| | | tctaagtttggcacaaacactggggacagtgtttttcctttattcttttatttgatta |
| 655 | Phopivirus strain | gggagtaaacctcaccaccgtttgccgtggtttacggctacctatttttggatgtaaatattaattcctg |
| | NewEngland | caggttcaggtctcttgaattatgtccacgctagtggcactctcttacccataagtgacgccttagcg |
| | | gaacctttctacacttgatgtggttaggggttacattatttccctgggccttctttggccctttttcccctg |
| | | cactatcattctttcttccgggctctcagcatgccaatgttccgaccggtgcgcccgccggggttaa |
| | | ctccatggttagcatggagctgtaggccctaaaagtgctgacactggaactggactattgaagcat |
| | | acactgttaactgaaacatgtaactccaatcgatcttctacaaggggtaggctacgggtgaaacccc |
| | | ttaggttaatactcatattgagagatacttctgataggttaaggttgctggataatggtgagtttaacga |
| | | caaaaaccattcaacagctgtgggccaacctcatcaggtagatgcttttggagccaagtgcgtagg |
| | | ggtgtgtgtggaaatgcttcagtggaaggtgccctcccgaaaggtcgtaggggtaatcaggggca |
| | | gttaggtttccacaattacaatttgaa |
| 656 | Pestivirus strain | gtatacgagattagctcatactcgtgtacaaattggacgtagcaaatttaaaaattcggatagggtcc |
| | Aydin | ccatccagcgacggccgaacggggttaaccatacctctagtaggactagcagacggatggacta |
| | | gccacagtggtgagctccctgggaggtctaagttctgagtacagaacagtcgtcagtagttcaacg |
| | | ctggtaaaccccagccttgagatgctacgtggacgagggcatgcccaagacacaccttaacctgg |
| | | acgggggtcgtccaggtgaaagtacccatctttgggtgctgggagtacagcctgatagggcgctg |
| | | cagaggcccactgacaggctagtataaaaatctctgctgtacatggaac |
| 657 | Quail | tttgcatcagttcgcccctcccctcaccatacctttttcccctctttaggactgatacttggttatgatga |
| | picornavirus | gcagaggatttcgcaagttatgcttcttgataaaaagtaattcacgaatcatgggattatagcctgga |
| | QPV1 | agtgaacactcatgtggcaagtgggttagtagctctccatgttcccatgtgcagtggactgacaaca |
| | | gtgagttcggggttgtgtagtaaagggaaagtattacttacccgcacctgctatacgtggtgtacgta |
| | | ggatacgagttagtagtgcttagcaactttaaactggtgctgaaatattgcaaggtcactgaagttgt |
| | | gaacgcgaacgctccgccactgccatgtatagcgtgcaatgcataaatggtgcactacatgatacg |
| | | agggaatgggaaaccctccatggccgaatgcagggtgacagcctgccggcggatgcctgttgtt |
| | | agtataatccgttgtttgccac |
| 658 | Porcine | acactcatttcccccctccacccttaaggtggttgtatcccctacaccctaccctcccttccacatagg |
| | sapelovirus 1 | acgaataaacggacttgagattaaggcaagtacataaggtatggtttttggatacacttaaatggca |
| | | gtagcgtggcgagctatggaaaaatcgcaattgtcgatagccatgttagcgacgcgcttcggcgtg |
| | | ctcctttggtgattcggcgactggttacaggagagtagacagtgagctatgggcaaacccctacag |
| | | tattacttaggggaatgtgcaattgagacttgacgagcgtctctttgagatgtggcgcatgctcttgg |
| | | cattaccatagtgagcttccaggttgggaaacctggactgggtctatactgcctgatagggtcgcg |
| | | gctggccgcctgtaactagtatagtcagttgaaaacccccc |
| 659 | Porcine | atgacgtataggtgttggctctatgccttggcatttgtattgtcaggagctgtgaccattggcacagc |
| | reproductive and | ccaaaacttgctgcacagaaacacccttctgtgatagcctccttcaggggagcttagggtttgtccct |
| | respiratory | agcaccttgcttccggagttgcactgctttacggtctctccacccctttaacc |
| | syndrome virus 2 | |
| 660 | Porcine | Gaaccttagaagtttacacaaacaaagaccaataggagtccaacacccagttggattgcggtcaa |
| | enterovirus 9 | gcacttctgtttccccggacctagtagtgataggctgtacccacggccgaagatgaacccgtccgtt |
| | | atccggctacctacttcgggaagcctagtaacattctgaagtctctgaggcgtttcgctcagcacga |
| | | ccccggtgtagatcgggctgatgggtctccgcataccccacgggcgaccgtggcggaggccgc |
| | | gttggcggcccgcctatggcgaaagccataggacgcctcttagatgacagggtgtgaagagcct |
| | | actgagctgggtagtagtcctccggcccctgaatgcggctaatcctaaccacggagcgtccacca |
| | | gcaatccagctggcagggcgtcgtaacgggcaactctgtggcggaaccgactactttgggtgtcc |
| | | gtgtttccttttgatcctattttggctgcttatggtgacaacgataagttgttatcataaagctcttgggtt |
| | | ggccacctggaaaaagttatcagtgtttgatattgttcggctctcacgcctaccaataagacaagcc |
| | | ctatatttacttgttgcattttactcgtcagaagaaatcacagagtatcatttggatttgttactcacatta |
| | | aggacaag |
| 661 | Pigeon | tttatttagctgttaagttttatttgtgccgagAccccatagtaggatcttggtgttccacattaagctct |
| | picornavirus B | Cccgaccacacatccaaacgataggcggtgtaagggctccctggctaagtgtttactcattgctag |
| | | ggaagtgttgcgacccgttaccagtaggaatacaggaggtcttagttgcctaaccagataaagtgg |
| | | tgctgaaatattgcaagctcaatgtctggcgaacgacggactaccgttgaactattgttaacgcccg |
| | | cgtgtgtaggcaacacacgggttagtaggtcacttacattgacatccgtgccgggaaagcggatct |
| | | gagctatcgattgcctgatagggtgccggcgggcgcggtacgtgtggtatagtccgctgtcttggg |
| | | gtatggcgtctactcggttttgttgtcgttttggaatgtcccatgtcggagatgtcgttaccggtgtttg |
| | | ctttacttgtgcacgaataagaaaacagagtttggagttttggaagttaatggataacatcaagtttcc |
| | | attgcgttcctcgtgcattttaggccagaaaatcgaccacaaaatcgaga |
| 662 | Picornavirus | aaacgggaggatcggctttggcttatcctcttaatagtctacaaaactgggctgactggtggggga |
| | HK21 | gctactagatccgggagaggactagttaccccgcgtaacttccctttttgtcactccctccacctacc |
| | | ccttccctgtcccttagactcttaagtaggtgtgcaggcctggccccccggaaatgggcaaatcgg |
| | | acgtttgcgtgtagggtcgttctgaaaggtggggcccactccaccgtagtaggatcttcctgtttcac |
| | | gtttaaacctctccgggcaggtatcgctagacactaggctgtataggatggcacgcacttaggtttc |
| | | gcaccttcctagtgcgccaagatcccgcttttgagctcaagtacatggttctttgtaagatgtctaacc |
| | | agaggaggtggtgctgaaatattgcaagccactctggcgaacgtccactgcattgcctggaacag |
| | | gctctctagcgccctccactggtagcgcggtggtgggttagtaggatacctatatggacaggggat |
| | | gcgggaatacccctcactagctagtgactggttgatcgactggcggcggatccagtgatacttgca |
| | | taatccgcagacttgggag |
| 663 | Picornavirales | agccatgaactagtgtgcgattcccacagtgttggtcgaaagccccgcactgtctactcgcatattt |
| | Tottori-HG1 | gactccagtccttccgcagccagcggttaggttctggttaaagtgcattatgtgcacggcgccacg |
| | | cagaactgccagaaatggtaagctgcgcccaacgccaacggtttgtgtatcccgttagtcacacgt |
| | | ttacagctgttcgttaacagtagggttttgtcgacccggaccccttaatgcgcgcgaattcaaccgc |
| | | gcctagtcggcaatggtatcatttaatcccatgcactacgggagaaatttgagaccaaagaattcct |
| | | gagggccactgcttgctctaagtgcaatgcctcgggagacttctgtcaggagcctagcggctttca |
| | | accgcgacagctaactcctgcgggatgtttggtgtccatacttactggcgtcctcacaacgctaagt |
| | | ggatgttgtccacaggtaggcaaacaccgagccccacattcaggagacctgtatgaacgatcctat |
| | | cagcattagagttggaattgggtgtgctaacgtccgcataagtgcaccccgtggtaacgctgggaa |
| | | actatccagcgcaacgtactgtcctcaatgtctagggaaggaccgccctaagcgtacaaccgggc |
| | | catgtgtcgagc |
| 664 | Rodent | ttcaaagaggggtccgggattttcctggtccccctctttgggcacccttggctcgggggtgtgaata |
| | hepatovirus | ccgtgctcgcgtttgccgtgcgttaacggcttcatttatgtttgtttgtctgttttattatgttGgtttgtct |
| | | gtttgttatgttggtattgttcgtgtttaatgttatgaccacattacactccagccaatgaagaacagatg |
| | | gtgcggttattgctggcggaattcctaacgtcctggatccgttggtacgcatcacaaaacaatttgca |
| | | gagagagtggtgaaacggcttgggaatccctgagtacagggaaatcacactgatagctcatcttg |
| | | gctgttttcagtcatggaccttatgcagtgtaatttgggtgtaccccccatagcttaggaggaatgttc |
| | | tgtcttggcactagagtgggacgctgatgcctccgtgtctaggatggtctaagggacagaatgggg |
| | | tgcctctgatgccatactacctgatagggtgctctcacggcctctgcatcttagtgagaagttcaattt |
| | | t |
| 665 | Rinderpest virus | accaaacaaagttgggtaaggatcggtctatcaatgattatgatttagcacacttaggattcaagatc |
| | | ctatcgactggagcaggcttaaggtaaaggttctttaaa |
| 666 | Rabovirus A | ctacggatatttgcatgacccgctttctatcgccccaacaatcccctttgtaaccacaagctttactca |
| | | ggctagcagcccgactagctgtttggaagaaaaggctagggcacacaccaacaacaccgaccc |
| | | cactggtcgaaggccgcttggcaataagactggtggaacagggtcgcctgtagttgtttggaacat |
| | | tctttctaatgactttgtcagcggtgctactcacaccgtaactcttctaccctatccccacgcttgtgga |
| | | actaggaggggatgagtgattcaagtaagtactgtcagaatggtgaaaatgatctgattctgaaacg |
| | | ctatggatccatcgaaagatggggctacacgcctgcggaacaacacatggtaacatgtgccccag |
| | | gggccgaaagccacggtgataggatcacccgtgtagtttgagatcatatcaatgttcatagtctagt |
| | | aagatgatttgaaatctaactgagctgatggctaactgcttgtcttattgcggcctaaggatgtcctgc |
| | | aggtacctttagataaccttaagagactattgatctgagcaggagccaaagtggtctttcccagcttt |
| | | ggttaaaaaacgtctaagccgcggcaggggggggaggccccctttcctcccaaaacttaatatt |
| | | gattgt |
| 667 | Shingleback | ctgtgagtaccgacaggctcgaagtctattatgaggcgtcgaaacagaaaacctgtaacaactccg |
| | nidovirus 1 | gtttcatctatcactgccgtcaagaggcagaagaggacgaccacgtgtcaccagatcacttgtatct |
| | | gtttcagtcaggaagtcaacttttcgacgaagttcgaccattcatcgacccgctgaaaagcgtagaa |
| | | gtcgatgaagatgagctccaaagagccatcgccgatttcgacaaccaaagtgactgtttccactcct |
| | | tcgagctcgtgaatttcgagctgaaacaacaaatcaacgagaacgagtggtacggttattataatta |
| | | cgacaaccaaaactgcaaagttcagttgccagtcacatgtcgaatcgaggacgtaacctgggatc |
| | | aggtttacgtg |
| 668 | Seneca valley | tttgaaatggggggctgggccctgatgcccagtccttcctttccccttccggggggttaaccggctg |
| | virus | tgtttgctagaggcacagaggggcaacatccaacctgcttttgcggggaacggtgcggctccgatt |
| | | cctgcgtcgccaaaggtgttagcgcacccaaacggcgcacctaccaatgttattggtgtggtctgc |
| | | gagttctagcctactcgtttctcccccgaccattcactcacccacgaaaagtgtgttgtaaccataag |
| | | atttaacccccgcacgggatgtgcgataaccgtaagactggctcaagcgcggaaagcgctgtaac |
| | | cacatgctgttagtccctttatggctgcaagatggctacccacctcggatcactgaactggagctcg |
| | | accctccttagtaagggaaccgagaggccttcgtgcaacaagctccgacacagagtccacgtga |
| | | ctgctaccaccatgagtacatggttctcccctctcgacccaggacttctttttgaatatccacggctcg |
| | | atccagagggtggggcatgacccctagcatagcgagctacagcgggaactgtagctaggcctta |
| | | gcgtgccttggatactgcctgatagggcgacggcctagtcgtgtcggttctataggtagcacatac |
| | | aaat |
| 669 | Sclerotinia | ttgaattaatcttttacgtttacgcgcataaaatcaggacacatctcttgtatactttagtatatcaatgat |
| | sclerotiorum | gtttttgttttatgcgattaatcgtaagagaacttctttccatccgcctgtatgggcgggataataagttc |
| | dsRNA | accgccttggtcgaggcgcaaacttgtatgtgcaaaggtgagctatatgctcgaaatagtcgtaact |
| | mycovirus-L | aacacacagccactacctgtagagctctattgatccggaatcctttagtgggaatgcagagctcaca |
| | | ccggacctgcgggtatcttcggcgttagggacttctgtttcagccttgaatcatttacctttataccttct |
| | | ctgaggcgcctgggccgggcgcgatattaagtacaagtcaaggacatcgcgggtagtggtctaat |
| | | cagccgctagtcctgctggagagttccaacttagttgggtgtggtgcatactagctggatagagtag |
| | | gtatgtattgctaacgtatgccggaggctatccgtcctcggtagaacgtgccgaggagtagtctctg |
| | | cagacccccgaacgcgtggggtctttacttaaatgtaggcggagggagcgctcgtaggtggaac |
| | | gactgcctcccagtcgaatgcaagattttgcacgcggaccagtctgcccggcaattcccgggtg |
| 670 | Yak enterovirus | ctccggcacagccgcaccagtgcactggtacgctagtaccttttcacggggtagtcggtatccccc |
| | | cccgtaacttagaagcatgtaacaaaccgaccaataggtgcgcggcagccagctgcgttgcggtc |
| | | aagcacttctgtctccccggtccgcaaggatcgttacccgcccactccactacgaggagcctagta |
| | | actggccaagtgattgcggagttgcgttcagccacaaccccagtggtagctctggaagatggggc |
| | | tcgcacatcccccgtggtaacacggttgcttgcccgcgtgtgcttccgggttcagtctccgactgttc |
| | | acttcaacatcacgcaaccagccaagagccgattgtgctggagtggtcttcctccggggccgtga |
| | | atgctgctaatcctaacctccgagcgtgtgcgcacaatccagtgttgctacgtcgtaacgcgtaagt |
| | | tggaggcggaacagactactttcggcaccccgtgtttcctttattttattcttattttatggtgacaattg |
| | | cagagatttgtgatattgcgactttaccgttaaacatagcactgcattacctggttgcattccacaaaa |
| | | cttcagagattcctagttcctacattgacctacttgtttatttgaatcttaaatacaaacttgagcaagtg |
| | | aa |
| 671 | Wobbly possum | cggctgtgagtgcttagcatatgctagagtactacagccgggtgttggagtcatatgcactggttgc |
| | disease virus | ctgtataatagtcgggatctgtctgacctacattatctttgggagttgcttatcacgacaattctcgaag |
| | | tgtctgtcgacagcttacccccgattcgacaaggccccttgtccaccgcagacctatcgattttcaac |
| | | gagaacactatcagaggtttaaatttaaaactcaccaaca |
| 672 | Avian | gctttttcaatcccttgtgtcgatgttcccgtatgtcatctggttcatgtaacggtgcaacttctatttttg |
| | orthoreovirus | gtaacgttcactgtcaggcagcgcaaaactcggcgggtggtgatcttcaagcgacttcctctcttgtt |
| | segment S1 | gcttattggccctacttggctgcgggcggtggtctgctcgttgttattattataattgttggcgctgtttg |
| | | ttgttgcaaggctaaggttaaagcggacgcagcccgaaacgttttctaccgagagctgttcgcactt |
| | | aattcgggtaaaagtgatgcaggacctccgatttaccaggtttagtgtacgacgatttgagttttcac |
| | | ctttcgtcttagaggagtgcactactccatctttcacgactataactaataccgatccggctctctactt |
| | | taacattgagtttccgtcaagtcatcgtctctcccccttcattccagaactgttgtctcagccttgtacc |
| | | gttcacgtttcattgattcggagattcgctctctgtgcaaccttatctagtatttgtgaatacgactgtgc |
| | | gctactgccatccatcaacgctattacgacgatccctacaccaggtgcgtcatcatctctgattgttc |
| | | attggg |
| 673 | Caprine | ggggcctcggccccctcaccctcttttccggtggccacgcccgggccaccgatacttcccttcact |
| | Kobuvirus d10 | ccttcgggactgttggggaggaacacaacagggctcccctgttttcccattccttcccccttttccca |
| | | accccaaccgccgtatctggtggcggcaagacacacgggtctttccctctaaagcacaattgtgtg |
| | | tgtgtcccaggtcctcctgcgtacggtgcgggagtgctcccacccaactgttgtaagcctgtccaa |
| | | cgcgtcgtcctggcaagactatgacgtcgcatgttccgctgcggatgccgaccgggtaaccggtt |
| | | ccccagtgtgtgtagtgcgatcttccaggtcctcctggttggcgttgtccagaaactgcttcaggtaa |
| | | gtggggtgtgcccaatccctacaaaggttgattctttcaccaccttaggaatgctccggaggtaccc |
| | | cagcaacagctgggatctgaccggaggctaattgtctacgggtggtgtttcctttttcttttcacacaa |
| | | ctctactgctgacaactcactgactatccacttgctctcttgtgcctttctgctctggttcaagttccttg |
| | | attgtttttgactgcttttcactgcttttcttctcacaatccttgctcagttcaaagtc |
| 674 | Caprine | ccccctcaccctcttttccggtggccacgcccgggccaccgatacttcccttcactccttcgggact |
| | Kobuvirus d20 | gttggggaggaacacaacagggctcccctgttttcccattccttcccccttttcccaaccccaaccg |
| | | ccgtatctggtggcggcaagacacacgggtctttccctctaaagcacaattgtgtgtgtgtcccagg |
| | | tcctcctgcgtacggtgcgggagtgctcccacccaactgttgtaagcctgtccaacgcgtgtcct |
| | | ggcaagactatgacgtcgcatgttccgctgcggatgccgaccgggtaaccggttccccagtgtgt |
| | | gtagtgcgatcttccaggtcctcctggttggcgttgtccagaaactgcttcaggtaagtggggtgtg |
| | | cccaatccctacaaaggttgattctttcaccaccttaggaatgctccggaggtaccccagcaacag |
| | | ctgggatctgaccggaggctaattgtctacgggtggtgtttcctttttcttttcacacaactctactgct |
| | | gacaactcactgactatccacttgctctcttgtgcctttctgctctggttcaagttccttgattgtttttga |
| | | ctgcttttcactgcttttcttctcacaatccttgctcagttcaaagtc |
| 675 | Caprine | ctcttttccggtggccacgcccgggccaccgatacttcccttcactccttcgggactgttggggagg |
| | Kobuvirus d30 | aacacaacagggctcccctgttttcccattccttcccccttttcccaaccccaaccgccgtatctggt |
| | | ggcggcaagacacacgggtctttccctctaaagcacaattgtgtgtgtgtcccaggtcctcctgcgt |
| | | acggtgcgggagtgctcccacccaactgttgtaagcctgtccaacgcgtcgtcctggcaagactat |
| | | gacgtcgcatgttccgctgcggatgccgaccgggtaaccggttccccagtgtgtgtagtgcgatct |
| | | tccaggtcctcctggttggcgttgtccagaaactgcttcaggtaagtggggtgtgcccaatccctac |
| | | aaaggttgattctttcaccaccttaggaatgctccggaggtaccccagcaacagctgggatctgac |
| | | cggaggctaattgtctacgggtggtgtttcctttttcttttcacacaactctactgctgacaactcactg |
| | | actatccacttgctctcttgtgcctttctgctctggttcaagttccttgattgtttttgactgcttttcactgc |
| | | ttttcttctcacaatccttgctcagttcaaagtc |
| 676 | Caprine | gtggccacgcccgggccaccgatacttcccttcactccttcgggactgttggggaggaacacaac |
| | Kobuvirus d40 | agggctcccctgttttcccattccttcccccttttcccaaccccaaccgccgtatctggtggcggcaa |
| | | gacacacgggtctttccctctaaagcacaattgtgtgtgtgtcccaggtcctcctgcgtacggtgcg |
| | | ggagtgctcccacccaactgttgtaagcctgtccaacgcgtcgtcctggcaagactatgacgtcgc |
| | | atgttccgctgcggatgccgaccgggtaaccggttccccagtgtgtgtagtgcgatcttccaggtc |
| | | ctcctggttggcgttgtccagaaactgcttcaggtaagtggggtgtgcccaatccctacaaaggttg |
| | | attctttcaccaccttaggaatgctccggaggtaccccagcaacagctgggatctgaccggaggct |
| | | aattgtctacgggtggtgtttcctttttcttttcacacaactctactgctgacaactcactgactatccact |
| | | tgctctcttgtgcctttctgctctggttcaagttccttgattgtttttgactgcttttcactgcttttcttctca |
| | | caatccttgctcagttcaaagtc |
| 677 | Caprine | ccgggccaccgatacttcccttcactccttcgggactgttggggaggaacacaacagggctcccc |
| | Kobuvirus d50 | tgttttcccattccttcccccttttcccaaccccaaccgccgtatctggtggcggcaagacacacgg |
| | | gtctttccctctaaagcacaattgtgtgtgtgtcccaggtcctcctgcgtacggtgcgggagtgctcc |
| | | cacccaactgttgtaagcctgtccaacgcgtcgtcctggcaagactatgacgtcgcatgttccgctg |
| | | cggatgccgaccgggtaaccggttccccagtgtgtgtagtgcgatcttccaggtcctcctggttgg |
| | | cgttgtccagaaactgcttcaggtaagtggggtgtgcccaatccctacaaaggttgattctttcacca |
| | | ccttaggaatgctccggaggtaccccagcaacagctgggatctgaccggaggctaattgtctacg |
| | | ggtggtgtttcctttttttttcacacaactctactgctgacaactcactgactatccacttgctctcttgt |
| | | gcctttctgctctggttcaagttccttgattgtttttgactgcttttcactgcttttcttctcacaatccttgct |
| | | cagttcaaagtc |
| 678 | Picornavirales sp. | tttgctcagcgtaacttctccgggttacgtggagaccaaaaggctacggagactcgggctacggc |
| | isolate RtMruf- | cctggagcacctaggtgctcctaaagacgttagaagttgtacaaactcgcccaatagggcccccc |
| | PicoV | aaccaggggggtagcgggcaagcacttctgtttccccggtatgatctcataggctgtacccacgg |
| | | ctgaaagagagattatcgttacccgcctcactacttcgagaagcccagtaatggttcatgaagttgat |
| | | ctcgttgacccggtgtttcccccacaccagaaacctgtgatgggggtggtcatcccggtcatggcg |
| | | acatgacggacctccccgcgccggcacagggcctcttcggaggacgagtgacatggattcaacc |
| | | gtgaagagcctattgagctagtgttgattcctccgcccccgtgaatgcggctaatcccaactccgga |
| | | gcaggcgggcccaaaccagggtctggcctgtcgtaacgcgaaagtctggagcggaaccgacta |
| | | ctttcgggaaggcgtgtttccttttgttccttttatcaagttttatggtgacaactcctggtagacgttttat |
| | | tgcgtttattgagagatttccaacaattgaacagactagaaccacttgttttatcaaaccctcacagaa |
| | | taagataaca |
| 679 | Apodemus | ttactcagcgtaactactccgggttacgtgatgaagaagaggctacggagattctcgggctacggc |
| | agrarius | cctggagccactccggctcctaaagatttagaagtttgagcacacccgcccactagggcccccca |
| | picornavirus | tccaggggggcaacgggcaagcacttctgtttccccggtatgatctgataggctgtaaccacggct |
| | strain Longquan- | gaaacagagattatcgttatccgcttcactacttcgagaagcctagtaatgatgggtgaaattgaatc |
| | Aa118 | cgttgatccggtgtctcccccacaccagaaactcatgatgagggttgccatcccggctacggcga |
| | | cgtagcgggcatccctgcgctggcatgaggcctcttaggaggacggatgatatggatcttgtcgtg |
| | | aagagcctattgagctagtgtcgactcctccgcccccgtgaatgcggctaatcctaaccccggagc |
| | | aggtgggtccaatccagggcctggcctgtcgtaatgcgtaagtctgggacggaaccgactactttc |
| | | gggaaggcgtgtttccatttgttcattatttgtgtgtttatggtgacaactctgggtaaacgttctattgc |
| | | gtttattgagagattcccaacaattgaacaaacgagaactacctgttttattaaatttacacagagaag |
| | | aattaca |
| 680 | Niviventer | ccctttcataaccccccccttttaacccaacccttcgtaaccgtacgcttcactcgcctttgggtatag |
| | confucianus | cggcccaatgtgctgaagaaaaggatacgctataaggggccaacgggtggtggcccttaagacc |
| | picornavirus | acccaacctagaagcttgtacactcgggcaatagtgaggcccacatccagtgggtcaagcccaaa |
| | | gcattcttgttccccggtatgatctcataagctgtacccacggctgaaagagtgattatcgttatccca |
| | | ctcagtacttcggagagcctagtacaccacttggaaatggaagtctgtgatccggggttgaccctg |
| | | aaccccagaaactcatgatgaggctaaccttcccgaacacggcgacgtgtggttagcctgcgctg |
| | | gcatgaggcctctttgtaggcagactgaaatggaagggtgacgaagagccgactgagctactgttt |
| | | tattcctccggccccctgaatgcggctaatcctaactcctggtccagtacttgtaacccaacaggtg |
| | | gctggtcgtaatgcgtaagccgggagcggaaccgactactttggggcgtccgtgtttctcaatatta |
| | | ttcatttctagcttatggtgacaatttatgattgcagagattgtgctgtatttgtgtctgagagaagaagt |
| | | aacaat |
| 681 | Bat picornavirus | tttcaaaaggccctgggcatacggcgttattcgtaacgtcgtatgtccagggcggtagcatcaggc |
| | isolate BtRs- | caaggcctgatgctaccacgtgtggactaaaccacacactcttcttgtgacacgttgtgtcacctatc |
| | Pico V | cctttcttggtaacttagaagcttgtacacttacgcacgtaggtgccccacatccagtggggtttgtg |
| | | caaagcaatcttgttccccggtaaaccctgataggctgtaaccacggccgaaacaaggtttgtcgtt |
| | | acccgactcactactacacaaagcctagtaaagttcaatgaaagtgcgcagcgtgatccggtcaaa |
| | | acccccttgaccagaaacacatgatgagggtcaccaacccccactggcgacagtgtggtgtccct |
| | | gcgttggcatgtggcctcgtagaggcgttgcaatctggatttgctccgaagagccccgtgtgctagt |
| | | gtttatacctccggccccttgaatgcggctaatcctaacccccgagcatgtacacacaagccagtgt |
| | | gtagcatgtcgtaatgagcaatttggggatggaaccgactactttagggtgtccgtgtttctcattatt |
| | | ctttgtttgatgtttt |
| 682 | Rhinolophus | ttttttttctcaggggtagcatccagccaaggcctgatgctaccaacgtgtgactaaaccacactct |
| | picornavirus | ctttttgtgatacattgtgtcacctatccctttcttggtaacttagaagcttgtacacccacgcacgtag |
| | strain Guizhou- | gtaccccacatccagtggggtttgtgcaaagcattcttgttccccggtaaaccctgataggctgtaa |
| | Rr100 | ccacggctgaaacaaggtttgtcgttacccgactcactactacgcaaagcctagtaaagttcaatga |
| | | aagtgcgcagcgtgatccggtcaaaacccccttgaccagaaacacatgatgagggtcaccaacc |
| | | cccactggcgacagtgtggtgtccctgcgttggcatgtggcctcatagaggcgttgcaatctggatt |
| | | tgctccgaagagccccgtgtgctagtgtttatacctccggccccttgaatgcggctaatcctaaccc |
| | | ccgagcatgtacacacacgccagtgtgcagcatgtcgtaatgagcaatttggggatggaaccgac |
| | | tactttagggtgtccgtgtttctcattattctttgtttgatgttttatggtgacaaca |
| 683 | Rhinolophus | cggaacgttgtatgctcagggcgtaggcaccacccacgggtggtgcctacacgtgtggactaaac |
| | picornavirus | cacacactcttttcagcacttagtgctgctatctctttttgtaacttagaagtttgtacacaatgcgttag |
| | strain Henan- | ggccacacatccagtgtggtatcgcaaagcacttctgtttccccggtgctagtaggagggtggctg |
| | Rf265 | ctccacggccacttgccgaacccatcgttacccgactcattacttcgcaaagcctagtaacccagtt |
| | | gaagcaagcccggcgtgttccggtcaggaaaaaccccccctggccagaaacatgtgatgagggt |
| | | gggctatccccactggtgacagtgagccctccctgcgttggcacatggcccgatctgggcgtggtt |
| | | cttgtggatgctgccgaagagccccgtgagctagtgtttataccgccggcctcgtgaatgcggcta |
| | | accctaaccccggagcagaggctactgaagccacagtagtcgctgtcgtaacgagtaattctggg |
| | | atgggaccgactactttcgagtgtccgtgtttcctttattcttttattgttgtttatggtgacaaac |
| 684 | Human | cccctaggatccactggatgtcagtacactggtatcgtggtacctttgtacgcctgttttataccccctt |
| | enterovirus C105 | ccccgcaactttagaagcatcaaaagcaccgctcaatagtcaccacacccccagtgtggtttcgag |
| | | caagcacttctgttttcccggttgcgtcccatatgctgtgcaaacggcaaaaagggacaatatcgtta |
| | | cccgcttgtatactacgggaaacctagtaccaccattgattgtgttgagagttgcgctcatcacctttc |
| | | cccggtgtagctcaggccgatgaggctcagaatcccccacaggtgactgtgtctgagcctgcgtt |
| | | ggcggcctgccctcgccttatggcgtgggacgcttgatacatgacatggtgcgaagagtctactgt |
| | | gctatgcaagagtcctccggcccctgaatgtggctaatcctaaccactgatcccacgcacgcaaac |
| | | cagtgtgtagtgggtcgtaacgcgcaagtcggtggcggaaccaactactttgggtgaccgtgtttc |
| | | ctttattacttattgaatgtttatggtgacaattgtttgattcagttgttgccattctctacattcatttaccca |
| | | gcatcaaaccaattgaactgttaca |
| 685 | Human | agtctggacatccctcaccggcgacggtggtccaggctgcgctggcggcctacctgtggtccaaa |
| | poliovirus 1 | gccacgggacgctacatgtgaacaaggtgtgaagagcctattgagctacaaaagagtcctccgg |
| | strain | cccctgaatgcggctaatcccaaccacggatcaagggtgcacaaaccagtgtacaccttgtcgta |
| | NIE1116623 | acgcgcaagtctgtggcggaaccgactactttgggtgtccgtgtttcctttttaattttgatggctgctt |
| | | atggtgacaatcatagattgttatcataaagctaattggattggccatccggtgagagtgaaatatatt |
| | | gtttacctccctgttgggtttactctaactaacttctccatttataaacttgtcatcacagttttaataatta |
| | | gaagtgcagtttaca |
| 686 | Human | tttaaaacagcctgggggttgttcccacccccagggcccactgggcgttagtactctggtatcgcg |
| | enterovirus 109 | gtaccttagtatgcctgttttatgtctcctttcccccgcaactttagaagtaatcaagttatggctcaaca |
| | | gtcgccacacccccagtgtggttccgagcaagcacttctgttccccggttgcgtcttatatgctgtgt |
| | | gaacggcagaaagggacaatatcgttatccgctcaactactacgggaagcctagtaccaccatgg |
| | | attgacctgaaagttgcgttcagcgcacccccagcgcagctcaggccgatgaggctccgaatacc |
| | | ccacgggcgaccgtgtcggagcctgcgttggcggcctgcccacgttgcaaaacgtgggacgctc |
| | | atttcatgacatggtgcgaagagcctactgtgctagttgagagtcctccggcccctgaatgtggata |
| | | atcctaaccactgaacctacgggcgcaaaccagcgtctggtaggccgtaacgcgcaagtcggtg |
| | | gcggaaccaactactttgggtgtccgtgtttccttttatctttttgaatgtttatggtgacaattgttgtgta |
| | | cagttgttaccatagtttgcattcagaaataaacctaacactttccaattatttgttaca |
| 687 | Human | ttgtgcgcctgttttatattccccccccgcaacttagaagcacgaaaccaagttcaatagaaggggg |
| | poliovirus 2 | tacaaaccagtaccaccacgaacaagcacttctgtttccccggtgacattgcatagactgctcacgc |
| | strain | ggttgaaagtgatcgatccgttacccgcttgtgtacttcgaaaagcctagtattgccttggaatcttcg |
| | NIE0811460 | acgcgttgcgctcagcacccgaccccggggtgtagcttaggctgatgagtctggacattcctcacc |
| | | ggtgacggtggtccaggctgcgttggcggcctacctatggctaatgccataggacgctagatgtg |
| | | aacaaggtgtgaagagcctattgagctacataagagtcctccggcccctgaatgcggctaatccta |
| | | accacggagcaggcggtcgcaaaccagtgactagcttgtcgtaacgcgcaagtctgtggcggaa |
| | | ccgactactttgggtgtccgtgtttcctgttatttttattatggctgcttatggtgacaatcagagattgtt |
| | | atcataaagcgaattggattggccatccggtgagtgttgtgtcaggtatacaactgtttgttggaacc |
| | | actgtgttagtttaacctctctttcaaccaattagtcaaaaacaatacgaagatagaacaacaatacta |
| | | ca |
| 688 | Bovine | ttttctcccctccccctccaactaccttttccccctcttgtaacgctagaagtttgtgcaaaccgcctgt |
| | picornavirus | agggtactgcaatccagcagtgcataggctaagcttttcttgttaccccaccccacattatactgagg |
| | | aggattgtgaaattgtgttagtatgggttagtagcggtgacccgggtaaccccaacccagaaactc |
| | | acggatgagatgaacaggaccccacatggtaacgtgtgtgttcgtctgccccgcaaggtgaggcc |
| | | gtgagagctttgcacgcgaaaaccttgaaaacccaaaagtaccttgagctcttcgctattttgtgtttc |
| | | ctccaggaccctgaatgcggctaaacctaacccgcgatccgcacgtagcaacccagctagagtgt |
| | | ggtcgtaatgcgcaagttgcgggcggtaccgactactttggtgttcctgtgtttcctttattttattttga |
| | | atttttatggtgacaacagctagaaaataagagtgaac |
| 689 | Human | acccttgtacgcctgttttatactcccctccccgtaacttagaagaaacaaaataagttcaataggag |
| | poliovirus 1 | ggggtacaaaccagtaccaccacgaacaagcacttctgtctccccggtgacattgcatagactgtc |
| | strain | cccacggttgaaagcaattgatccgttacccgctcttgtacttcgagaagcctagtaccatcttggaa |
| | EQG1419328 | tcatcgatgcgttgcgctccacactcagtcccagagtgtagcttaggctgatgagtctggacattcct |
| | | caccggcgacggtggtccaggctgcgttggcggcctacctgtggcccaaagccacaggacgct |
| | | agatgtgaacaaggtgtgaagagcctattgagctataagagagtcctccggcccctgaatgcggc |
| | | taatcccaaccacggatcaagggtgcacgaaccagtgtataccttgtcgtaacgcgcaagtccgtg |
| | | gcggaaccgactactttgggtgaccgtgtttccttttattatttcaatggctgcttatggtgacaatcatt |
| | | gattgttatcataaagcgaattggactggccatccggtgaaagtgaaacatattgtttgcctcctcgtt |
| | | gggtctacttcaaccaatctttacttacaatcttaccactacagttttgctggttagaagtgtgtttcacg |
| 690 | Human | ttgtgcgcctgttttatactcccctcccgcaacttagaagcacgaaaccaagttcaatagaaggggg |
| | poliovirus 2 | tacaaaccagtaccactacgaacaagcacttctgtttccccggtgacattgcatagactgctcacgc |
| | isolate IS_061 | ggttgaaagtgatcgatccgttacccgcttgtgtacttcgaaaagcctagtatcgccttggaatcttc |
| | | gacgcgttgcgctcagcacccgaccccggggtgtagcttaggccgatgagtctggacattcctca |
| | | ccggtgacggtggtccaggctgcgttggcggcctacctatggctaacgccataggacgttagatg |
| | | tgaacaaggtgtgaagagcctattgagctacataagagtcctccggcccctgaatgcggctaatcc |
| | | taaccacggagcaggcggtcgcgaaccagtgactggcttgtcgtaacgcgcaagtctgtggcgg |
| | | aaccgactactttgggtgtccgtgtttcctgttatttttatcatggctgcttatggtgacaatcagagatt |
| | | gttatcataaagcgaattggattggccatccggtgagtgttgtgtcaggtatacaactgtttgttggaa |
| | | ccactgtgttagctttgcttctcatttaaccaattaatcaaaaacaatacgaggataaaacaacaatac |
| | | taca |
| 691 | Coxsackievirus | cctttgtgcgcctgttttatgcccccttcccccaattgaaacttagaagttacacacaccgatcaacag |
| | B5 | cgggcgtggcataccagccgcgtcttgatcaagcactcctgtttccccggaccgagtatcaataga |
| | | ctgctcacgcggttgaaggagaaaacgttcgttacccggctaactacttcgagaaacctagtagca |
| | | tcatgaaagttgcgaagcgtttcgctcagcacatccccagtgtagatcaggtcgatgagtcaccgc |
| | | attccccacgggcgaccgtggcggtggctgcgttggcggcctgcctacggggcaacccgtagg |
| | | acgcttcaatacagacatggtgcgaagagtcgattgagctagttagtagtcctccggcccctgaatc |
| | | cggctaatcctaactgcggagcacataccctcaacccagggggcattgtgtcgtaacgggtaact |
| | | ctgcagcggaaccgactactttgggtgtccgtgtttccttttattcttataatggctgcttatggtgaca |
| | | attgaaagattgttaccatatagctattggattggccatccggtgtctaacagagctattatatacctct |
| | | ttgttggatttgtaccacttgatctaaaggaagtcaagacactacaattcatcatacaattgaacacag |
| | | caaa |
| 692 | Coxsackievirus | tttgtgcgcctgttttacaacccttccccaacttgtaacgtagaagtaatacacactactgatcaatag |
| | A10 | caggcatggcgcgccagtcatgtctcgatcaagcacttctgttcccccggactgagtatcaataga |
| | | ctgctcacgcggttgaaggagaaaacgttcgttacccggctaactacttcgagaaacctagtagca |
| | | ccatagaagctgcagagtgtttcgctcagcacttcccccgtgtagatcaggctgatgagtcactgca |
| | | atccccacgggtgaccgtggcagtggctgcgttggcggcctgcctatggggcaacccataggac |
| | | gctctaatgtggacatggtgcgaagagtctattgagctagttagtagtcctccggcccctgaatgcg |
| | | gctaatcctaactgcggagcacatgccttcaacccagaaggtagtgtgtcgtaacgggcaactctg |
| | | cagcggaaccgactactttgggtgtccgtgtttctttttattcctatattggctgcttatggtgacaatca |
| | | cggaattgttgccatatagctattggattggccatccggtgtctaatagagctattgtgtacctatttgtt |
| | | ggatttactccgctatcacataaatctctgaacactttgtgctttatattgaacttaaacacccgaaa |

[1245] In some embodiments, an IRES of the invention is an IRES having a sequence as listed in Table 17 (SEQ ID NOs: 1-72 and 348-389). In some embodiments, an IRES is a Salivirus IRES. In some embodiments, an IRES is a Salivirus SZ1 IRES. In some embodiments, an IRES is a AP1.0 (SEQ ID NO:348). In some embodiments, an IRES is a CK1.0 (SEQ ID NO:349). In some embodiments, an IRES is a PV1.0 (SEQ ID NO:350). In some embodiments, an IRES is a SV1.0 (SEQ ID NO:351).

TABLE 18
Anabaena permutation site 5′ intron fragment sequences.

| SEQ | Permutation | |
|---|---|---|
| ID NO | site | Sequence |
| 73 | L2-1 | GAAGAAATTCTTTAAGTGGATGCTCTCAAACTCAGGGAAACC |
| | | TAAATCTAGTTATAGACAAGGCAATCCTGAGCCAAGCCGAAG |
| | | TAGTAATTAGTAAGTTAACAATAGATGACTTACAACTAATCG |
| | | GAAGGTGCAGAGACTCGACGGGAGCTACCCTAACGTCAAGAC |
| | | GAGGGTAAAGAGAGAGTCCAATTCTCAAAGCCAATAGGCAGT |
| | | AGCGAAAGCTGCAAGAGAATGAAAATCCGT |
| 74 | L2-2 | AAGAAATTCTTTAAGTGGATGCTCTCAAACTCAGGGAAACCT |
| | | AAATCTAGTTATAGACAAGGCAATCCTGAGCCAAGCCGAAGT |
| | | AGTAATTAGTAAGTTAACAATAGATGACTTACAACTAATCGG |
| | | AAGGTGCAGAGACTCGACGGGAGCTACCCTAACGTCAAGACG |
| | | AGGGTAAAGAGAGAGTCCAATTCTCAAAGCCAATAGGCAGTA |
| | | GCGAAAGCTGCAAGAGAATGAAAATCCGT |
| 75 | L2-3 | AGAAATTCTTTAAGTGGATGCTCTCAAACTCAGGGAAACCTA |
| | | AATCTAGTTATAGACAAGGCAATCCTGAGCCAAGCCGAAGTA |
| | | GTAATTAGTAAGTTAACAATAGATGACTTACAACTAATCGGA |
| | | AGGTGCAGAGACTCGACGGGAGCTACCCTAACGTCAAGACGA |
| | | GGGTAAAGAGAGAGTCCAATTCTCAAAGCCAATAGGCAGTAG |
| | | CGAAAGCTGCAAGAGAATGAAAATCCGT |
| 76 | L5-1 | GTTATAGACAAGGCAATCCTGAGCCAAGCCGAAGTAGTAATT |
| | | AGTAAGTTAACAATAGATGACTTACAACTAATCGGAAGGTGC |
| | | AGAGACTCGACGGGAGCTACCCTAACGTCAAGACGAGGGTAA |
| | | AGAGAGAGTCCAATTCTCAAAGCCAATAGGCAGTAGCGAAAG |
| | | CTGCAAGAGAATGAAAATCCGT |
| 77 | L5-2 | TTATAGACAAGGCAATCCTGAGCCAAGCCGAAGTAGTAATTA |
| | | GTAAGTTAACAATAGATGACTTACAACTAATCGGAAGGTGCA |
| | | GAGACTCGACGGGAGCTACCCTAACGTCAAGACGAGGGTAAA |
| | | GAGAGAGTCCAATTCTCAAAGCCAATAGGCAGTAGCGAAAGC |
| | | TGCAAGAGAATGAAAATCCGT |
| 78 | L5-3 | TATAGACAAGGCAATCCTGAGCCAAGCCGAAGTAGTAATTAG |
| | | TAAGTTAACAATAGATGACTTACAACTAATCGGAAGGTGCAG |
| | | AGACTCGACGGGAGCTACCCTAACGTCAAGACGAGGGTAAAG |
| | | AGAGAGTCCAATTCTCAAAGCCAATAGGCAGTAGCGAAAGCT |
| | | GCAAGAGAATGAAAATCCGT |
| 79 | L5-4 | ATAGACAAGGCAATCCTGAGCCAAGCCGAAGTAGTAATTAGT |
| | | AAGTTAACAATAGATGACTTACAACTAATCGGAAGGTGCAGA |
| | | GACTCGACGGGAGCTACCCTAACGTCAAGACGAGGGTAAAGA |
| | | GAGAGTCCAATTCTCAAAGCCAATAGGCAGTAGCGAAAGCTG |
| | | CAAGAGAATGAAAATCCGT |
| 80 | L5-5 | TAGACAAGGCAATCCTGAGCCAAGCCGAAGTAGTAATTAGTA |
| | | AGTTAACAATAGATGACTTACAACTAATCGGAAGGTGCAGAG |
| | | ACTCGACGGGAGCTACCCTAACGTCAAGACGAGGGTAAAGAG |
| | | AGAGTCCAATTCTCAAAGCCAATAGGCAGTAGCGAAAGCTGC |
| | | AAGAGAATGAAAATCCGT |
| 81 | L6-1 | ACAATAGATGACTTACAACTAATCGGAAGGTGCAGAGACTCG |
| | | ACGGGAGCTACCCTAACGTCAAGACGAGGGTAAAGAGAGAG |
| | | TCCAATTCTCAAAGCCAATAGGCAGTAGCGAAAGCTGCAAGA |
| | | GAATGAAAATCCGT |
| 82 | L6-2 | CAATAGATGACTTACAACTAATCGGAAGGTGCAGAGACTCGA |
| | | CGGGAGCTACCCTAACGTCAAGACGAGGGTAAAGAGAGAGTC |
| | | CAATTCTCAAAGCCAATAGGCAGTAGCGAAAGCTGCAAGAGA |
| | | ATGAAAATCCGT |
| 83 | L6-3 | AATAGATGACTTACAACTAATCGGAAGGTGCAGAGACTCGAC |
| | | GGGAGCTACCCTAACGTCAAGACGAGGGTAAAGAGAGAGTCC |
| | | AATTCTCAAAGCCAATAGGCAGTAGCGAAAGCTGCAAGAGAA |
| | | TGAAAATCCGT |
| 84 | L6-4 | ATAGATGACTTACAACTAATCGGAAGGTGCAGAGACTCGACG |
| | | GGAGCTACCCTAACGTCAAGACGAGGGTAAAGAGAGAGTCCA |
| | | ATTCTCAAAGCCAATAGGCAGTAGCGAAAGCTGCAAGAGAAT |
| | | GAAAATCCGT |
| 85 | L6-5 | TAGATGACTTACAACTAATCGGAAGGTGCAGAGACTCGACGG |
| | | GAGCTACCCTAACGTCAAGACGAGGGTAAAGAGAGAGTCCAA |
| | | TTCTCAAAGCCAATAGGCAGTAGCGAAAGCTGCAAGAGAATG |
| | | AAAATCCGT |
| 86 | L6-6 | AGATGACTTACAACTAATCGGAAGGTGCAGAGACTCGACGGG |
| | | AGCTACCCTAACGTCAAGACGAGGGTAAAGAGAGAGTCCAAT |
| | | TCTCAAAGCCAATAGGCAGTAGCGAAAGCTGCAAGAGAATGA |
| | | AAATCCGT |
| 87 | L6-7 | GATGACTTACAACTAATCGGAAGGTGCAGAGACTCGACGGGA |
| | | GCTACCCTAACGTCAAGACGAGGGTAAAGAGAGAGTCCAATT |
| | | CTCAAAGCCAATAGGCAGTAGCGAAAGCTGCAAGAGAATGA |
| | | AAATCCGT |
| 88 | L6-8 | ATGACTTACAACTAATCGGAAGGTGCAGAGACTCGACGGGAG |
| | | CTACCCTAACGTCAAGACGAGGGTAAAGAGAGAGTCCAATTC |
| | | TCAAAGCCAATAGGCAGTAGCGAAAGCTGCAAGAGAATGAA |
| | | AATCCGT |
| 89 | L6-9 | TGACTTACAACTAATCGGAAGGTGCAGAGACTCGACGGGAGC |
| | | TACCCTAACGTCAAGACGAGGGTAAAGAGAGAGTCCAATTCT |
| | | CAAAGCCAATAGGCAGTAGCGAAAGCTGCAAGAGAATGAAA |
| | | ATCCGT |
| 90 | L8-1 | CAAGACGAGGGTAAAGAGAGAGTCCAATTCTCAAAGCCAATA |
| | | GGCAGTAGCGAAAGCTGCAAGAGAATGAAAATCCGT |
| 91 | L8-2 | AAGACGAGGGTAAAGAGAGAGTCCAATTCTCAAAGCCAATAG |
| | | GCAGTAGCGAAAGCTGCAAGAGAATGAAAATCCGT |
| 92 | L8-3 | AGACGAGGGTAAAGAGAGAGTCCAATTCTCAAAGCCAATAGG |
| | | CAGTAGCGAAAGCTGCAAGAGAATGAAAATCCGT |
| 93 | L8-4 | GACGAGGGTAAAGAGAGAGTCCAATTCTCAAAGCCAATAGGC |
| | | AGTAGCGAAAGCTGCAAGAGAATGAAAATCCGT |
| 94 | L8-5 | ACGAGGGTAAAGAGAGAGTCCAATTCTCAAAGCCAATAGGCA |
| | | GTAGCGAAAGCTGCAAGAGAATGAAAATCCGT |
| 95 | L9a-1 | AATAGGCAGTAGCGAAAGCTGCAAGAGAATGAAAATCCGT |
| 96 | L9a-2 | ATAGGCAGTAGCGAAAGCTGCAAGAGAATGAAAATCCGT |
| 97 | L9a-3 | TAGGCAGTAGCGAAAGCTGCAAGAGAATGAAAATCCGT |
| 98 | L9a-4 | AGGCAGTAGCGAAAGCTGCAAGAGAATGAAAATCCGT |
| 99 | L9a-5 | GGCAGTAGCGAAAGCTGCAAGAGAATGAAAATCCGT |
| 100 | L9-1 | GAAAGCTGCAAGAGAATGAAAATCCGT |
| 101 | L9-2 | AAAGCTGCAAGAGAATGAAAATCCGT |
| 102 | L9-3 | AAGCTGCAAGAGAATGAAAATCCGT |
| 103 | L9-4 | AGCTGCAAGAGAATGAAAATCCGT |
| 104 | L9-5 | GCTGCAAGAGAATGAAAATCCGT |
| 105 | L9-6 | CTGCAAGAGAATGAAAATCCGT |
| 106 | L9-7 | AAGAGAATGAAAATCCGT |
| 107 | L9-8 | AGAGAATGAAAATCCGT |
| 108 | L9-9 | GAGAATGAAAATCCGT |
| 109 | L9a-6 | GCAGTAGCGAAAGCTGCAAGAGAATGAAAATCCGT |
| 110 | L9a-7 | AGTAGCGAAAGCTGCAAGAGAATGAAAATCCGT |
| 111 | L9a-8 | GTAGCGAAAGCTGCAAGAGAATGAAAATCCGT |

[1246] In some embodiments, a 5′ intron fragment is a fragment having a sequence listed in Table 18. Typically, a construct containing a 5′ intron fragment listed in Table 18 will contain a corresponding 3′ intron fragment as listed in Table 19 (e.g., both representing fragments with the L⁹a-8 permutation site).

TABLE 19
Anabaena permutation site 3′ intron fragment sequences.

| SEQ | Permutation | |
|---|---|---|
| ID NO | site | Sequence |
| 112 | L2-1 | ACGGACTTAAATAATTGAGCCTTAAA |
| 113 | L2-2 | ACGGACTTAAATAATTGAGCCTTAAAG |
| 114 | L2-3 | ACGGACTTAAATAATTGAGCCTTAAAGA |
| 115 | L5-1 | ACGGACTTAAATAATTGAGCCTTAAAGAAGAAATTCTTTAAG |
| | | TGGATGCTCTCAAACTCAGGGAAACCTAAATCTA |
| 116 | L5-2 | ACGGACTTAAATAATTGAGCCTTAAAGAAGAAATTCTTTAAG |
| | | TGGATGCTCTCAAACTCAGGGAAACCTAAATCTAG |
| 117 | L5-3 | ACGGACTTAAATAATTGAGCCTTAAAGAAGAAATTCTTTAAG |
| | | TGGATGCTCTCAAACTCAGGGAAACCTAAATCTAGT |
| 118 | L5-4 | ACGGACTTAAATAATTGAGCCTTAAAGAAGAAATTCTTTAAG |
| | | TGGATGCTCTCAAACTCAGGGAAACCTAAATCTAGTT |
| 119 | L5-5 | ACGGACTTAAATAATTGAGCCTTAAAGAAGAAATTCTTTAAG |
| | | TGGATGCTCTCAAACTCAGGGAAACCTAAATCTAGTTA |
| 120 | L6-1 | ACGGACTTAAATAATTGAGCCTTAAAGAAGAAATTCTTTAAG |
| | | TGGATGCTCTCAAACTCAGGGAAACCTAAATCTAGTTATAGA |
| | | CAAGGCAATCCTGAGCCAAGCCGAAGTAGTAATTAGTAAGTT |
| | | A |
| 121 | L6-2 | ACGGACTTAAATAATTGAGCCTTAAAGAAGAAATTCTTTAAG |
| | | TGGATGCTCTCAAACTCAGGGAAACCTAAATCTAGTTATAGA |
| | | CAAGGCAATCCTGAGCCAAGCCGAAGTAGTAATTAGTAAGTT |
| | | AA |
| 122 | L6-3 | ACGGACTTAAATAATTGAGCCTTAAAGAAGAAATTCTTTAAG |
| | | TGGATGCTCTCAAACTCAGGGAAACCTAAATCTAGTTATAGA |
| | | CAAGGCAATCCTGAGCCAAGCCGAAGTAGTAATTAGTAAGTT |
| | | AAC |
| 123 | L6-4 | ACGGACTTAAATAATTGAGCCTTAAAGAAGAAATTCTTTAAG |
| | | TGGATGCTCTCAAACTCAGGGAAACCTAAATCTAGTTATAGA |
| | | CAAGGCAATCCTGAGCCAAGCCGAAGTAGTAATTAGTAAGTT |
| | | AACA |
| 124 | L6-5 | ACGGACTTAAATAATTGAGCCTTAAAGAAGAAATTCTTTAAG |
| | | TGGATGCTCTCAAACTCAGGGAAACCTAAATCTAGTTATAGA |
| | | CAAGGCAATCCTGAGCCAAGCCGAAGTAGTAATTAGTAAGTT |
| | | AACAA |
| 125 | L6-6 | ACGGACTTAAATAATTGAGCCTTAAAGAAGAAATTCTTTAAG |
| | | TGGATGCTCTCAAACTCAGGGAAACCTAAATCTAGTTATAGA |
| | | CAAGGCAATCCTGAGCCAAGCCGAAGTAGTAATTAGTAAGTT |
| | | AACAAT |
| 126 | L6-7 | ACGGACTTAAATAATTGAGCCTTAAAGAAGAAATTCTTTAAG |
| | | TGGATGCTCTCAAACTCAGGGAAACCTAAATCTAGTTATAGA |
| | | CAAGGCAATCCTGAGCCAAGCCGAAGTAGTAATTAGTAAGTT |
| | | AACAATA |
| 127 | L6-8 | ACGGACTTAAATAATTGAGCCTTAAAGAAGAAATTCTTTAAG |
| | | TGGATGCTCTCAAACTCAGGGAAACCTAAATCTAGTTATAGA |
| | | CAAGGCAATCCTGAGCCAAGCCGAAGTAGTAATTAGTAAGTT |
| | | AACAATAG |
| 128 | L6-9 | ACGGACTTAAATAATTGAGCCTTAAAGAAGAAATTCTTTAAG |
| | | TGGATGCTCTCAAACTCAGGGAAACCTAAATCTAGTTATAGA |
| | | CAAGGCAATCCTGAGCCAAGCCGAAGTAGTAATTAGTAAGTT |
| | | AACAATAGA |
| 129 | L8-1 | ACGGACTTAAATAATTGAGCCTTAAAGAAGAAATTCTTTAAG |
| | | TGGATGCTCTCAAACTCAGGGAAACCTAAATCTAGTTATAGA |
| | | CAAGGCAATCCTGAGCCAAGCCGAAGTAGTAATTAGTAAGTT |
| | | AACAATAGATGACTTACAACTAATCGGAAGGTGCAGAGACT |
| | | CGACGGGAGCTACCCTAACGT |
| 130 | L8-2 | ACGGACTTAAATAATTGAGCCTTAAAGAAGAAATTCTTTAAG |
| | | TGGATGCTCTCAAACTCAGGGAAACCTAAATCTAGTTATAGA |
| | | CAAGGCAATCCTGAGCCAAGCCGAAGTAGTAATTAGTAAGTT |
| | | AACAATAGATGACTTACAACTAATCGGAAGGTGCAGAGACT |
| | | CGACGGGAGCTACCCTAACGTC |
| 131 | L8-3 | ACGGACTTAAATAATTGAGCCTTAAAGAAGAAATTCTTTAAG |
| | | TGGATGCTCTCAAACTCAGGGAAACCTAAATCTAGTTATAGA |
| | | CAAGGCAATCCTGAGCCAAGCCGAAGTAGTAATTAGTAAGTT |
| | | AACAATAGATGACTTACAACTAATCGGAAGGTGCAGAGACT |
| | | CGACGGGAGCTACCCTAACGTCA |
| 132 | L8-4 | ACGGACTTAAATAATTGAGCCTTAAAGAAGAAATTCTTTAAG |
| | | TGGATGCTCTCAAACTCAGGGAAACCTAAATCTAGTTATAGA |
| | | CAAGGCAATCCTGAGCCAAGCCGAAGTAGTAATTAGTAAGTT |
| | | AACAATAGATGACTTACAACTAATCGGAAGGTGCAGAGACT |
| | | CGACGGGAGCTACCCTAACGTCAA |
| 133 | L8-5 | ACGGACTTAAATAATTGAGCCTTAAAGAAGAAATTCTTTAAG |
| | | TGGATGCTCTCAAACTCAGGGAAACCTAAATCTAGTTATAGA |
| | | CAAGGCAATCCTGAGCCAAGCCGAAGTAGTAATTAGTAAGTT |
| | | AACAATAGATGACTTACAACTAATCGGAAGGTGCAGAGACT |
| | | CGACGGGAGCTACCCTAACGTCAAG |
| 134 | L9a-1 | ACGGACTTAAATAATTGAGCCTTAAAGAAGAAATTCTTTAAG |
| | | TGGATGCTCTCAAACTCAGGGAAACCTAAATCTAGTTATAGA |
| | | CAAGGCAATCCTGAGCCAAGCCGAAGTAGTAATTAGTAAGTT |
| | | AACAATAGATGACTTACAACTAATCGGAAGGTGCAGAGACT |
| | | CGACGGGAGCTACCCTAACGTCAAGACGAGGGTAAAGAGAG |
| | | AGTCCAATTCTCAAAGCC |
| 135 | L9a-2 | ACGGACTTAAATAATTGAGCCTTAAAGAAGAAATTCTTTAAG |
| | | TGGATGCTCTCAAACTCAGGGAAACCTAAATCTAGTTATAGA |
| | | CAAGGCAATCCTGAGCCAAGCCGAAGTAGTAATTAGTAAGTT |
| | | AACAATAGATGACTTACAACTAATCGGAAGGTGCAGAGACT |
| | | CGACGGGAGCTACCCTAACGTCAAGACGAGGGTAAAGAGAG |
| | | AGTCCAATTCTCAAAGCCA |
| 136 | L9a-3 | ACGGACTTAAATAATTGAGCCTTAAAGAAGAAATTCTTTAAG |
| | | TGGATGCTCTCAAACTCAGGGAAACCTAAATCTAGTTATAGA |
| | | CAAGGCAATCCTGAGCCAAGCCGAAGTAGTAATTAGTAAGTT |
| | | AACAATAGATGACTTACAACTAATCGGAAGGTGCAGAGACT |
| | | CGACGGGAGCTACCCTAACGTCAAGACGAGGGTAAAGAGAG |
| | | AGTCCAATTCTCAAAGCCAA |
| 137 | L9a-4 | ACGGACTTAAATAATTGAGCCTTAAAGAAGAAATTCTTTAAG |
| | | TGGATGCTCTCAAACTCAGGGAAACCTAAATCTAGTTATAGA |
| | | CAAGGCAATCCTGAGCCAAGCCGAAGTAGTAATTAGTAAGTT |
| | | AACAATAGATGACTTACAACTAATCGGAAGGTGCAGAGACT |
| | | CGACGGGAGCTACCCTAACGTCAAGACGAGGGTAAAGAGAG |
| | | AGTCCAATTCTCAAAGCCAAT |
| 138 | L9a-5 | ACGGACTTAAATAATTGAGCCTTAAAGAAGAAATTCTTTAAG |
| | | TGGATGCTCTCAAACTCAGGGAAACCTAAATCTAGTTATAGA |
| | | CAAGGCAATCCTGAGCCAAGCCGAAGTAGTAATTAGTAAGTT |
| | | AACAATAGATGACTTACAACTAATCGGAAGGTGCAGAGACT |
| | | CGACGGGAGCTACCCTAACGTCAAGACGAGGGTAAAGAGAG |
| | | AGTCCAATTCTCAAAGCCAATA |
| 139 | L9-1 | ACGGACTTAAATAATTGAGCCTTAAAGAAGAAATTCTTTAAG |
| | | TGGATGCTCTCAAACTCAGGGAAACCTAAATCTAGTTATAGA |
| | | CAAGGCAATCCTGAGCCAAGCCGAAGTAGTAATTAGTAAGTT |
| | | AACAATAGATGACTTACAACTAATCGGAAGGTGCAGAGACT |
| | | CGACGGGAGCTACCCTAACGTCAAGACGAGGGTAAAGAGAG |
| | | AGTCCAATTCTCAAAGCCAATAGGCAGTAGC |
| 140 | L9-2 | ACGGACTTAAATAATTGAGCCTTAAAGAAGAAATTCTTTAAG |
| | | TGGATGCTCTCAAACTCAGGGAAACCTAAATCTAGTTATAGA |
| | | CAAGGCAATCCTGAGCCAAGCCGAAGTAGTAATTAGTAAGTT |
| | | AACAATAGATGACTTACAACTAATCGGAAGGTGCAGAGACT |
| | | CGACGGGAGCTACCCTAACGTCAAGACGAGGGTAAAGAGAG |
| | | AGTCCAATTCTCAAAGCCAATAGGCAGTAGCG |
| 141 | L9-3 | ACGGACTTAAATAATTGAGCCTTAAAGAAGAAATTCTTTAAG |
| | | TGGATGCTCTCAAACTCAGGGAAACCTAAATCTAGTTATAGA |
| | | CAAGGCAATCCTGAGCCAAGCCGAAGTAGTAATTAGTAAGTT |
| | | AACAATAGATGACTTACAACTAATCGGAAGGTGCAGAGACT |
| | | CGACGGGAGCTACCCTAACGTCAAGACGAGGGTAAAGAGAG |
| | | AGTCCAATTCTCAAAGCCAATAGGCAGTAGCGA |
| 142 | L9-4 | ACGGACTTAAATAATTGAGCCTTAAAGAAGAAATTCTTTAAG |
| | | TGGATGCTCTCAAACTCAGGGAAACCTAAATCTAGTTATAGA |
| | | CAAGGCAATCCTGAGCCAAGCCGAAGTAGTAATTAGTAAGTT |
| | | AACAATAGATGACTTACAACTAATCGGAAGGTGCAGAGACT |
| | | CGACGGGAGCTACCCTAACGTCAAGACGAGGGTAAAGAGAG |
| | | AGTCCAATTCTCAAAGCCAATAGGCAGTAGCGAA |
| 143 | L9-5 | ACGGACTTAAATAATTGAGCCTTAAAGAAGAAATTCTTTAAG |
| | | TGGATGCTCTCAAACTCAGGGAAACCTAAATCTAGTTATAGA |
| | | CAAGGCAATCCTGAGCCAAGCCGAAGTAGTAATTAGTAAGTT |
| | | AACAATAGATGACTTACAACTAATCGGAAGGTGCAGAGACT |
| | | CGACGGGAGCTACCCTAACGTCAAGACGAGGGTAAAGAGAG |
| | | AGTCCAATTCTCAAAGCCAATAGGCAGTAGCGAAA |
| 144 | L9-6 | ACGGACTTAAATAATTGAGCCTTAAAGAAGAAATTCTTTAAG |
| | | TGGATGCTCTCAAACTCAGGGAAACCTAAATCTAGTTATAGA |
| | | CAAGGCAATCCTGAGCCAAGCCGAAGTAGTAATTAGTAAGTT |
| | | AACAATAGATGACTTACAACTAATCGGAAGGTGCAGAGACT |
| | | CGACGGGAGCTACCCTAACGTCAAGACGAGGGTAAAGAGAG |
| | | AGTCCAATTCTCAAAGCCAATAGGCAGTAGCGAAAG |
| 145 | L9-7 | ACGGACTTAAATAATTGAGCCTTAAAGAAGAAATTCTTTAAG |
| | | TGGATGCTCTCAAACTCAGGGAAACCTAAATCTAGTTATAGA |
| | | CAAGGCAATCCTGAGCCAAGCCGAAGTAGTAATTAGTAAGTT |
| | | AACAATAGATGACTTACAACTAATCGGAAGGTGCAGAGACT |
| | | CGACGGGAGCTACCCTAACGTCAAGACGAGGGTAAAGAGAG |
| | | AGTCCAATTCTCAAAGCCAATAGGCAGTAGCGAAAGCTGC |
| 146 | L9-8 | ACGGACTTAAATAATTGAGCCTTAAAGAAGAAATTCTTTAAG |
| | | TGGATGCTCTCAAACTCAGGGAAACCTAAATCTAGTTATAGA |
| | | CAAGGCAATCCTGAGCCAAGCCGAAGTAGTAATTAGTAAGTT |
| | | AACAATAGATGACTTACAACTAATCGGAAGGTGCAGAGACT |
| | | CGACGGGAGCTACCCTAACGTCAAGACGAGGGTAAAGAGAG |
| | | AGTCCAATTCTCAAAGCCAATAGGCAGTAGCGAAAGCTGCA |
| 147 | L9-9 | ACGGACTTAAATAATTGAGCCTTAAAGAAGAAATTCTTTAAG |
| | | TGGATGCTCTCAAACTCAGGGAAACCTAAATCTAGTTATAGA |
| | | CAAGGCAATCCTGAGCCAAGCCGAAGTAGTAATTAGTAAGTT |
| | | AACAATAGATGACTTACAACTAATCGGAAGGTGCAGAGACT |
| | | CGACGGGAGCTACCCTAACGTCAAGACGAGGGTAAAGAGAG |
| | | AGTCCAATTCTCAAAGCCAATAGGCAGTAGCGAAAGCTGCA |
| | | A |
| 148 | L9a-6 | ACGGACTTAAATAATTGAGCCTTAAAGAAGAAATTCTTTAAG |
| | | TGGATGCTCTCAAACTCAGGGAAACCTAAATCTAGTTATAGA |
| | | CAAGGCAATCCTGAGCCAAGCCGAAGTAGTAATTAGTAAGTT |
| | | AACAATAGATGACTTACAACTAATCGGAAGGTGCAGAGACT |
| | | CGACGGGAGCTACCCTAACGTCAAGACGAGGGTAAAGAGAG |
| | | AGTCCAATTCTCAAAGCCAATAG |
| 149 | L9a-7 | ACGGACTTAAATAATTGAGCCTTAAAGAAGAAATTCTTTAAG |
| | | TGGATGCTCTCAAACTCAGGGAAACCTAAATCTAGTTATAGA |
| | | CAAGGCAATCCTGAGCCAAGCCGAAGTAGTAATTAGTAAGTT |
| | | AACAATAGATGACTTACAACTAATCGGAAGGTGCAGAGACT |
| | | CGACGGGAGCTACCCTAACGTCAAGACGAGGGTAAAGAGAG |
| | | AGTCCAATTCTCAAAGCCAATAGGC |
| 150 | L9a-8 | ACGGACTTAAATAATTGAGCCTTAAAGAAGAAATTCTTTAAG |
| | | TGGATGCTCTCAAACTCAGGGAAACCTAAATCTAGTTATAGA |
| | | CAAGGCAATCCTGAGCCAAGCCGAAGTAGTAATTAGTAAGTT |
| | | AACAATAGATGACTTACAACTAATCGGAAGGTGCAGAGACT |
| | | CGACGGGAGCTACCCTAACGTCAAGACGAGGGTAAAGAGAG |
| | | AGTCCAATTCTCAAAGCCAATAGGCA |

[1247] S06831 In some embodiments, a 3′ intron fragment is a fragment having a sequence listed in Table 19. In some embodiments, a construct containing a 3′ intron fragment listed in Table 19 will contain a corresponding 5′ intron fragment as listed in Table 18 (e.g., both representing fragments with the L9a-8 permutation site).

TABLE 20
Non-anabaena permutation site 5′ intron fragment sequences.

| SEQ | | |
|---|---|---|
| ID NO | Intron | Sequence |
| 151 | Azop1 | tgcgccgatgaaggtgtagagactagacggcacccacctaaggcaaacgctatggtgaaggcatagtcca |
| | | gggagtggcgaaagtcacacaaaccggaatccgt |
| 152 | Azop2 | ccgggcgtatggcaacgccgagccaagcttcggcgcctgcgccgatgaaggtgtagagactagacggc |
| | | acccacctaaggcaaacgctatggtgaaggcatagtccagggagtggcgaaagtcacacaaaccggaat |
| | | ccgt |
| 153 | Azop3 | acggcacccacctaaggcaaacgctatggtgaaggcatagtccagggagtggcgaaagtcacacaaacc |
| | | ggaatccgt |
| 154 | Azop4 | acgctatggtgaaggcatagtccagggagtggcgaaagtcacacaaaccggaatccgt |
| 155 | S795pl | attaaagttatagaattatcagagaatgatatagtccaagccttatggtaacatgagggcacttgaccctggta |
| | | g |
| 156 | Twortp1 | aagatgtaggcaatcctgagctaagctcttagtaataagagaaagtgcaacgactattccgataggaagtag |
| | | ggtcaagtgactcgaaatggggattacccttctagggtagtgatatagtctgaacatatatggaaacatatag |
| | | aaggataggagtaacgaacctattcgtaacataattgaacttttagttat |
| 157 | Twortp2 | taataagagaaagtgcaacgactattccgataggaagtagggtcaagtgactcgaaatggggattacccttc |
| | | tagggtagtgatatagtctgaacatatatggaaacatatagaaggataggagtaacgaacctattcgtaacat |
| | | aattgaacttttagttat |
| 158 | Twortp3 | taggaagtagggtcaagtgactcgaaatggggattacccttctagggtagtgatatagtctgaacatatatgg |
| | | aaacatatagaaggataggagtaacgaacctattcgtaacataattgaacttttagttat |
| 159 | Twortp4 | ctagggtagtgatatagtctgaacatatatggaaacatatagaaggataggagtaacgaacctattcgtaaca |
| | | taattgaacttttagttat |
| 160 | LSUp1 | agttaataaagatgatgaaatagtctgaaccattttgagaaaagtggaaataaaagaaaatcttttatgataac |
| | | ataaattgaacaggctaa |
| 161 | Phip1 | caaagactgatgatatagtccgacactcctagtaataggagaatacagaaaggatgaaatcc |
| 162 | Nostoc | agtcgagggtaaagggagagtccaattctcaaagcctattggcagtagcgaaagctgcgggagaatgaaa |
| | | atccgt |
| 163 | Nostoc | agccgagggtaaagggagagtccaattctcaaagccaataggcagtagcgaaagctgcgggagaatgaa |
| | | aatccgt |
| 164 | Nodularia | agccgagggtaaagggagagtccaattctcaaagccgaaggttattaaaacctggcagcagtgaaagctg |
| | | cgggagaatgaaaatccgt |
| 165 | Pleurocapsa | agctgagggtaaagagagagtccaattctcaaagccagcagatggcagtagcgaaagctgcgggagaat |
| | | gaaaatccgt |
| 166 | Planktothrix | agccgagggtaaagagagagtccaattctcaaagccaattggtagtagcgaaagctacgggagaatgaaa |
| | | atccgt |

[1248] In some embodiments, a 5′ intron fragment is a fragment having a sequence listed in Table 20. A construct containing a 5′ intron fragment listed in Table 20 will contain a corresponding 3′ intron fragment in Table 21 (e.g., both representing fragments with the Azop1 intron).

TABLE 21
Non-anabaena permutation site 3' intron fragment sequences.

| SEQ | | |
|---|---|---|
| ID NO | Intron | Sequence |
| 167 | Azop1 | gcggactcatatttcgatgtgccttgcgccgggaaaccacgcaagggatggtgtcaaattcggcgaaac |
| | | ctaagcgcccgcccgggcgtatggcaacgccgagccaagcttcggcgcc |
| 168 | Azop2 | gcggactcatatttcgatgtgccttgcgccgggaaaccacgcaagggatggtgtcaaattcggcgaaac |
| | | ctaagcgcccgc |
| 169 | Azop3 | gcggactcatatttcgatgtgccttgcgccgggaaaccacgcaagggatggtgtcaaattcggcgaaac |
| | | ctaagcgcccgcccgggcgtatggcaacgccgagccaagcttcggcgcctgcgccgatgaaggtgta |
| | | gagactag |
| 170 | Azop4 | gcggactcatatttcgatgtgccttgcgccgggaaaccacgcaagggatggtgtcaaattcggcgaaac |
| | | ctaagcgcccgcccgggcgtatggcaacgccgagccaagcttcggcgcctgcgccgatgaaggtgta |
| | | gagactagacggcacccacctaaggcaa |
| 171 | S795pl | aggattagatactacactaagtgtcccccagactggtgacagtctggtgtgcatccagctatatcggtgaa |
| | | accccattggggtaataccgagggaagctatattatatatatattaataaatagccccgtagagactatgta |
| | | ggtaaggagatagaagatgataaaatcaaaatcatc |
| 172 | Twortp1 | actactgaaagcataaataattgtgcctttatacagtaatgtatatcgaaaaatcctctaattcagggaacac |
| | | ctaaacaaact |
| 173 | Twortp2 | actactgaaagcataaataattgtgcctttatacagtaatgtatatcgaaaaatcctctaattcagggaacac |
| | | ctaaacaaactaagatgtaggcaatcctgagctaagctcttag |
| 174 | Twortp3 | actactgaaagcataaataattgtgcctttatacagtaatgtatatcgaaaaatcctctaattcagggaacac |
| | | ctaaacaaactaagatgtaggcaatcctgagctaagctcttagtaataagagaaagtgcaacgactattcc |
| | | ga |
| 175 | Twortp4 | actactgaaagcataaataattgtgcctttatacagtaatgtatatcgaaaaatcctctaattcagggaacac |
| | | ctaaacaaactaagatgtaggcaatcctgagctaagctcttagtaataagagaaagtgcaacgactattcc |
| | | gataggaagtagggtcaagtgactcgaaatggggattaccctt |
| 176 | LSUp1 | cgctagggatttataactgtgagtcctccaatattataaaatgttggtaatatattgggtaaatttcaaagaca |
| | | acttttctccacgtcaggatatagtgtatttgaagcgaaacttattttagcagtgaaaaagcaaataaggac |
| | | gttcaacgactaaaaggtgagtattgctaacaataatccttttttttaatgcccaacatctttattaact |
| 177 | Phip1 | gtgggtgcataaactatttcattgtgcacattaaatctggtgaactcggtgaaaccctaatggggcaatacc |
| | | gagccaagccatagggaggatatatgagaggcaagaagttaattcttgaggccactgagactggctgta |
| | | tcatccctacgtcacacaaacttaatgccgatggttatttcagaaagaaaaccaatggcgtcttagagatgt |
| | | atcacagaacggtgtggaaggagcataacggagacatacctgatggcttcgagatagaccataagtgtc |
| | | gcaatagggcttgctgtaatatagagcatttacagatgcttgagggtacagcccacactgttaagaccaat |
| | | cgtgaacgctacgcagacagaaaggaaacagctagggaatactggctggagactggatgtaccggcc |
| | | tagcactcggtgagaagtttggtgtgtcgttctcttctgcttgtaagtggattagagaatggaaggcgtaga |
| | | gactatccgaaaggagtagggccgagggtgagactccctcgtaacccgaagcgccagacagtcaact |
| 178 | Nostoc | acggacttaagtaattgagccttaaagaagaaattctttaagtggcagctctcaaactcagggaaacctaa |
| | | atctgttcacagacaaggcaatcctgagccaagccgaaagagtcatgagtgctgagtagtgagtaaaat |
| | | aaaagctcacaactcagaggttgtaactctaagctagtcggaaggtgcagagactcgacgggagctac |
| | | cctaacgtaa |
| 179 | Nostoc | acggacttaaactgaattgagccttagagaagaaattctttaagtgtcagctctcaaactcagggaaacct |
| | | aaatctgttgacagacaaggcaatcctgagccaagccgagaactctaagttattcggaaggtgcagaga |
| | | ctcgacgggagctaccctaacgtca |
| 180 | Nodularia | acggacttagaaaactgagccttgatcgagaaatctttcaagtggaagctctcaaattcagggaaacctaa |
| | | atctgtttacagatatggcaatcctgagccaagccgaaacaagtcctgagtgttaaagctcataactcatc |
| | | ggaaggtgcagagactcgacgggagctaccctaacgtta |
| 181 | Pleurocapsa | acggacttaaaaaaattgagccttggcagagaaatctgtcatgcgaacgctctcaaattcagggaaacct |
| | | aagtctggcaacagatatggcaatcctgagccaagccttaatcaaggaaaaaaacatttttaccttttacctt |
| | | gaaaggaaggtgcagagactcaacgggagctaccctaacaggtca |
| 182 | Planktothrix | acggacttaaagataaattgagccttgaggcgagaaatctctcaagtgtaagctgtcaaattcagggaaa |
| | | cctaaatctgtaaattcagacaaggcaatcctgagccaagcctaggggtattagaaatgagggagtttcc |
| | | ccaatctaagatcaatacctaggaaggtgcagagactcgacgggagctaccctaacgtta |

[1249] In some embodiments, a 3′ intron fragment is a fragment having a sequence listed in Table 21. A construct containing a 3′ intron fragment listed in Table 21 will contain the corresponding 5′ intron fragment as listed in Table 20 (e.g., both representing fragments with the Azop1 intron).

TABLE 22
Spacer and Anabaena 5′ intron fragment sequences.

| SEQ | | |
|---|---|---|
| ID NO | Spacer | Sequence |
| 183 | T25 L10 | agtatataagaaacaaaccacTAGATGACTTACAACTAATCGGAAGGTGC |
| | | AGAGACTCGACGGGAGCTACCCTAACGTCAAGACGAGGGTAA |
| | | AGAGAGAGTCCAATTCTCAAAGCCAATAGGCAGTAGCGAAAG |
| | | CTGCAAGAGAATGAAAATCCGTggctcgcagc |
| 184 | T25 L20 | ctgaaattatacttatactcaaacaaaccacTAGATGACTTACAACTAATCGGAA |
| | | GGTGCAGAGACTCGACGGGAGCTACCCTAACGTCAAGACGAG |
| | | GGTAAAGAGAGAGTCCAATTCTCAAAGCCAATAGGCAGTAGC |
| | | GAAAGCTGCAAGAGAATGAAAATCCGTggctcgcagc |
| 185 | T25 L30 | ctgaaattatacttatactcagtatatgacaaacaaaccacTAGATGACTTACAACTAA |
| | (I80-10) | TCGGAAGGTGCAGAGACTCGACGGGAGCTACCCTAACGTCAA |
| | [Control] | GACGAGGGTAAAGAGAGAGTCCAATTCTCAAAGCCAATAGGC |
| | | AGTAGCGAAAGCTGCAAGAGAATGAAAATCCGTggctcgcagc |
| 186 | T25 L40 | catcaacaatatgaaattatacttatactcagtatatgacaaacaaaccacTAGATGACTTAC |
| | | AACTAATCGGAAGGTGCAGAGACTCGACGGGAGCTACCCTAA |
| | | CGTCAAGACGAGGGTAAAGAGAGAGTCCAATTCTCAAAGCCA |
| | | ATAGGCAGTAGCGAAAGCTGCAAGAGAATGAAAATCCGTggct |
| | | cgcagc |
| 187 | T25 L50 | catcaacaatatgaaactatacttatactcagtatatgaagcattatcgcaaacaaaccacTAGATG |
| | | ACTTACAACTAATCGGAAGGTGCAGAGACTCGACGGGAGCTA |
| | | CCCTAACGTCAAGACGAGGGTAAAGAGAGAGTCCAATTCTCA |
| | | AAGCCAATAGGCAGTAGCGAAAGCTGCAAGAGAATGAAAAT |
| | | CCGTggctcgcagc |
| 188 | T50 L10 | tagcgtcagcaaacaaacaaaTAGATGACTTACAACTAATCGGAAGGTGC |
| | | AGAGACTCGACGGGAGCTACCCTAACGTCAAGACGAGGGTAA |
| | | AGAGAGAGTCCAATTCTCAAAGCCAATAGGCAGTAGCGAAAG |
| | | CTGCAAGAGAATGAAAATCCGTggctcgcagc |
| 189 | T50 L20 | atactcatactagcgtcagcaaacaaacaaaTAGATGACTTACAACTAATCGGA |
| | | AGGTGCAGAGACTCGACGGGAGCTACCCTAACGTCAAGACGA |
| | | GGGTAAAGAGAGAGTCCAATTCTCAAAGCCAATAGGCAGTAG |
| | | CGAAAGCTGCAAGAGAATGAAAATCCGTggctcgcagc |
| 190 | T50 L30 | gtgtgaagctatactcatactagcgtcagcaaacaaacaaaTAGATGACTTACAACTA |
| | | ATCGGAAGGTGCAGAGACTCGACGGGAGCTACCCTAACGTCA |
| | | AGACGAGGGTAAAGAGAGAGTCCAATTCTCAAAGCCAATAGG |
| | | CAGTAGCGAAAGCTGCAAGAGAATGAAAATCCGTggctcgcagc |
| 191 | T50 L40 | cctcacctgagtgtgaagctatactcatactagcgtcagcaaacaaacaaaTAGATGACTTA |
| | | CAACTAATCGGAAGGTGCAGAGACTCGACGGGAGCTACCCTA |
| | | ACGTCAAGACGAGGGTAAAGAGAGAGTCCAATTCTCAAAGCC |
| | | AATAGGCAGTAGCGAAAGCTGCAAGAGAATGAAAATCCGTgg |
| | | ctcgcagc |
| 192 | T50 L50 | ccgaatgatgcctcacctgagtgtgaagctatactcatactagcgtcagcaaacaaacaaaTAGAT |
| | | GACTTACAACTAATCGGAAGGTGCAGAGACTCGACGGGAGCT |
| | | ACCCTAACGTCAAGACGAGGGTAAAGAGAGAGTCCAATTCTC |
| | | AAAGCCAATAGGCAGTAGCGAAAGCTGCAAGAGAATGAAAA |
| | | TCCGTggctcgcagc |
| 193 | T75 L10 | cggtgcgagcaaacaaacaaaTAGATGACTTACAACTAATCGGAAGGTG |
| | | CAGAGACTCGACGGGAGCTACCCTAACGTCAAGACGAGGGTA |
| | | AAGAGAGAGTCCAATTCTCAAAGCCAATAGGCAGTAGCGAAA |
| | | GCTGCAAGAGAATGAAAATCCGTggctcgcagc |
| 194 | T75 L20 | cgctccgacccagtgcgagcaaacaaacaaaTAGATGACTTACAACTAATCGG |
| | | AAGGTGCAGAGACTCGACGGGAGCTACCCTAACGTCAAGACG |
| | | AGGGTAAAGAGAGAGTCCAATTCTCAAAGCCAATAGGCAGTA |
| | | GCGAAAGCTGCAAGAGAATGAAAATCCGTggctcgcagc |
| 195 | T25 L30 | ctgaaattatactAatactcagtatatgacaaacaaaccacTAGATGACTTACAACTAA |
| | 1MM | TCGGAAGGTGCAGAGACTCGACGGGAGCTACCCTAACGTCAA |
| | | GACGAGGGTAAAGAGAGAGTCCAATTCTCAAAGCCAATAGGC |
| | | AGTAGCGAAAGCTGCAAGAGAATGAAAATCCGTggctcgcagc |
| 196 | T25 L30 | ctgaaaAtatactAatactcaCtatatgacaaacaaaccacTAGATGACTTACAACTA |
| | 3MM | ATCGGAAGGTGCAGAGACTCGACGGGAGCTACCCTAACGTCA |
| | | AGACGAGGGTAAAGAGAGAGTCCAATTCTCAAAGCCAATAGG |
| | | CAGTAGCGAAAGCTGCAAGAGAATGAAAATCCGTggctcgcagc |
| 197 | T25 L30 | ctgaTaAtataGtAatactcaCtatatgacaaacaaaccacTAGATGACTTACAACT |
| | 5MM | AATCGGAAGGTGCAGAGACTCGACGGGAGCTACCCTAACGTC |
| | | AAGACGAGGGTAAAGAGAGAGTCCAATTCTCAAAGCCAATAG |
| | | GCAGTAGCGAAAGCTGCAAGAGAATGAAAATCCGTggctcgcagc |
| 198 | T25 L30 | ctgaTaAtaAaGtAatacAcaCtataAgacaaacaaaccacTAGATGACTTACAA |
| | 8MM | CTAATCGGAAGGTGCAGAGACTCGACGGGAGCTACCCTAACG |
| | | TCAAGACGAGGGTAAAGAGAGAGTCCAATTCTCAAAGCCAAT |
| | | AGGCAGTAGCGAAAGCTGCAAGAGAATGAAAATCCGTggctcgc |
| | | agc |
| 199 | T25 L30 | ctgaaattatacttatactctctaagttacaaacaaaccacTAGATGACTTACAACTAAT |
| | OffTarget 10 | CGGAAGGTGCAGAGACTCGACGGGAGCTACCCTAACGTCAAG |
| | | ACGAGGGTAAAGAGAGAGTCCAATTCTCAAAGCCAATAGGCA |
| | | GTAGCGAAAGCTGCAAGAGAATGAAAATCCGTggctcgcagc |
| 200 | T25 L30 | ctgaaattatgtgtgttacAtctaagttacaaacaaaccacTAGATGACTTACAACTAA |
| | OffTarget 20 | TCGGAAGGTGCAGAGACTCGACGGGAGCTACCCTAACGTCAA |
| | | GACGAGGGTAAAGAGAGAGTCCAATTCTCAAAGCCAATAGGC |
| | | AGTAGCGAAAGCTGCAAGAGAATGAAAATCCGTggctcgcagc |
| 201 | T25 L30 | gttgatcggtgtgtgttacAtctaagttacaaacaaaccacTAGATGACTTACAACTAA |
| | OffTarget 30 | TCGGAAGGTGCAGAGACTCGACGGGAGCTACCCTAACGTCAA |
| | | GACGAGGGTAAAGAGAGAGTCCAATTCTCAAAGCCAATAGGC |
| | | AGTAGCGAAAGCTGCAAGAGAATGAAAATCCGTggctcgcagc |
| 202 | T25 L30 I25- | ctgaaattatacttatactcagtatatgacaaacaaaccacTAGATGACTTACAACTAA |
| | 10 | TCGGAAGGTGCAGAGACTCGACGGGAGCTACCCTAACGTCAA |
| | | GACGAGGGTAAAGAGAGAGTCCAATTCTCAAAGCCAATAGGC |
| | | AGTAGCGAAAGCTGCAAGAGAATGAAAATCCGTgattaaacag |
| 203 | T25 L30 I25- | ctgaaattatacttatactcagtatatgacaaacaaaccacTAGATGACTTACAACTAA |
| | 20 | TCGGAAGGTGCAGAGACTCGACGGGAGCTACCCTAACGTCAA |
| | | GACGAGGGTAAAGAGAGAGTCCAATTCTCAAAGCCAATAGGC |
| | | AGTAGCGAAAGCTGCAAGAGAATGAAAATCCGTgattcacaatataaa |
| | | ttacg |
| 204 | T25 L30 I50- | ctgaaattatacttatactcagtatatgacaaacaaaccacTAGATGACTTACAACTAA |
| | 10 | TCGGAAGGTGCAGAGACTCGACGGGAGCTACCCTAACGTCAA |
| | | GACGAGGGTAAAGAGAGAGTCCAATTCTCAAAGCCAATAGGC |
| | | AGTAGCGAAAGCTGCAAGAGAATGAAAATCCGTggatcatagc |
| 205 | T25 L30 I50- | ctgaaattatacttatactcagtatatgacaaacaaaccacTAGATGACTTACAACTAA |
| | 20 | TCGGAAGGTGCAGAGACTCGACGGGAGCTACCCTAACGTCAA |
| | | GACGAGGGTAAAGAGAGAGTCCAATTCTCAAAGCCAATAGGC |
| | | AGTAGCGAAAGCTGCAAGAGAATGAAAATCCGTggatcgcagcataa |
| | | tatccg |
| 206 | T25 L30 I80- | ctgaaattatacttatactcagtatatgacaaacaaaccacTAGATGACTTACAACTAA |
| | 20 | TCGGAAGGTGCAGAGACTCGACGGGAGCTACCCTAACGTCAA |
| | | GACGAGGGTAAAGAGAGAGTCCAATTCTCAAAGCCAATAGGC |
| | | AGTAGCGAAAGCTGCAAGAGAATGAAAATCCGTggctcgcagcgcg |
| | | cctaccg |
| 207 | T25 L30 I80- | ctgaaattatacttatactcagtatatgacaaacaaaccacTAGATGACTTACAACTAA |
| | 20x2 | TCGGAAGGTGCAGAGACTCGACGGGAGCTACCCTAACGTCAA |
| | | GACGAGGGTAAAGAGAGAGTCCAATTCTCAAAGCCAATAGGC |
| | | AGTAGCGAAAGCTGCAAGAGAATGAAAATCCGTggctcgcagcgcg |
| | | cctaccgaaagccggcgtcgacgttagcgc |
| 208 | T25 L30 I50- | ctgaaattatacttatactcagtatatgacaaacaaaccacTAGATGACTTACAACTAA |
| | 20x2 | TCGGAAGGTGCAGAGACTCGACGGGAGCTACCCTAACGTCAA |
| | | GACGAGGGTAAAGAGAGAGTCCAATTCTCAAAGCCAATAGGC |
| | | AGTAGCGAAAGCTGCAAGAGAATGAAAATCCGTggatcgcagcataa |
| | | tatccgaaacgaggatacaagtgacatgc |
| 209 | T25 L30 I25- | ctgaaattatacttatactcagtatatgacaaacaaaccacTAGATGACTTACAACTAA |
| | 20x2 | TCGGAAGGTGCAGAGACTCGACGGGAGCTACCCTAACGTCAA |
| | | GACGAGGGTAAAGAGAGAGTCCAATTCTCAAAGCCAATAGGC |
| | | AGTAGCGAAAGCTGCAAGAGAATGAAAATCCGTgattcacaatctaaa |
| | | ttacgaaacgataaatgataactctaac |
| 210 | T0 L0 | aaacaaaccacTAGATGACTTACAACTAATCGGAAGGTGCAGAGAC |
| | | TCGACGGGAGCTACCCTAACGTCAAGACGAGGGTAAAGAGAG |
| | | AGTCCAATTCTCAAAGCCAATAGGCAGTAGCGAAAGCTGCAA |
| | | GAGAATGAAAATCCGTggctcgcagc |
| 211 | T100 L5 | cgggcaaacaaacaaaTAGATGACTTACAACTAATCGGAAGGTGCAG |
| | | AGACTCGACGGGAGCTACCCTAACGTCAAGACGAGGGTAAAG |
| | | AGAGAGTCCAATTCTCAAAGCCAATAGGCAGTAGCGAAAGCT |
| | | GCAAGAGAATGAAAATCCGTggctcgcagc |
| 212 | T75 L30 | cgctccgacgagcttccggccagtgcgagcaaacaaacaaaTAGATGACTTACAACT |
| | | AATCGGAAGGTGCAGAGACTCGACGGGAGCTACCCTAACGTC |
| | | AAGACGAGGGTAAAGAGAGAGTCCAATTCTCAAAGCCAATAG |
| | | GCAGTAGCGAAAGCTGCAAGAGAATGAAAATCCGTggctcgcagc |
| 213 | T0 L0a | aaacaaaccacGGCAGTAGCGAAAGCTGCAAGAGAATGAAAATCC |
| | | GTggctcgcagc |
| 214 | T25 L10a | agtatataagaaacaaaccacGGCAGTAGCGAAAGCTGCAAGAGAATGA |
| | | AAATCCGTggctcgcagc |
| 215 | T25 L20a | ctgaaattatacttatactcaaacaaaccacGGCAGTAGCGAAAGCTGCAAGAG |
| | | AATGAAAATCCGTggctcgcagc |
| 216 | T25 L30a | ctgaaattatacttatactcagtatatgacaaacaaaccacGGCAGTAGCGAAAGCTGC |
| | (I80-10) | AAGAGAATGAAAATCCGTggctcgcagc |
| | [Control] | |
| 217 | T50 L10a | tagcgtcagcaaacaaacaaaGGCAGTAGCGAAAGCTGCAAGAGAATGA |
| | | AAATCCGTggctcgcagc |
| 218 | T50 L20a | atactcatactagcgtcagcaaacaaacaaaGGCAGTAGCGAAAGCTGCAAGAG |
| | | AATGAAAATCCGTggctcgcagc |
| 219 | T50 L30a | gtgtgaagctatactcatactagcgtcagcaaacaaacaaaGGCAGTAGCGAAAGCTG |
| | | CAAGAGAATGAAAATCCGTggctcgcagc |
| 220 | T75 L10a | cggtgcgagcaaacaaacaaaGGCAGTAGCGAAAGCTGCAAGAGAATGA |
| | | AAATCCGTggctcgcagc |
| 221 | T75 L20a | cgctccgacccagtgcgagcaaacaaacaaaGGCAGTAGCGAAAGCTGCAAGA |
| | | GAATGAAAATCCGTggctcgcagc |
| 222 | T75 L30a | cgctccgacgagcttccggccagtgcgagcaaacaaacaaaGGCAGTAGCGAAAGCT |
| | | GCAAGAGAATGAAAATCCGTggctcgcagc |
| 223 | T0 L0b | aaacaaaccacAAGACGAGGGTAAAGAGAGAGTCCAATTCTCAAA |
| | | GCCAATAGGCAGTAGCGAAAGCTGCAAGAGAATGAAAATCC |
| | | GTggctcgcagc |
| 224 | T25 L10b | agtatataagaaacaaaccacAAGACGAGGGTAAAGAGAGAGTCCAATTC |
| | | TCAAAGCCAATAGGCAGTAGCGAAAGCTGCAAGAGAATGAA |
| | | AATCCGTggctcgcagc |
| 225 | T25 L20b | ctgaaattatacttatactcaaacaaaccacAAGACGAGGGTAAAGAGAGAGTC |
| | | CAATTCTCAAAGCCAATAGGCAGTAGCGAAAGCTGCAAGAGA |
| | | ATGAAAATCCGTggctcgcagc |
| 226 | T25 L30b | ctgaaattatacttatactcagtatatgacaaacaaaccacAAGACGAGGGTAAAGAG |
| | (I80-10) | AGAGTCCAATTCTCAAAGCCAATAGGCAGTAGCGAAAGCTGC |
| | [Control] | AAGAGAATGAAAATCCGTggctcgcagc |
| 227 | T50 L10b | tagcgtcagcaaacaaacaaaAAGACGAGGGTAAAGAGAGAGTCCAATT |
| | | CTCAAAGCCAATAGGCAGTAGCGAAAGCTGCAAGAGAATGA |
| | | AAATCCGTggctcgcagc |
| 228 | T50 L20b | atactcatactagcgtcagcaaacaaacaaaAAGACGAGGGTAAAGAGAGAGT |
| | | CCAATTCTCAAAGCCAATAGGCAGTAGCGAAAGCTGCAAGAG |
| | | AATGAAAATCCGTggctcgcagc |
| 229 | T50 L30b | gtgtgaagctatactcatactagcgtcagcaaacaaacaaaAAGACGAGGGTAAAGA |
| | | GAGAGTCCAATTCTCAAAGCCAATAGGCAGTAGCGAAAGCTG |
| | | CAAGAGAATGAAAATCCGTggctcgcagc |
| 230 | T75 L10b | cggtgcgagcaaacaaacaaaAAGACGAGGGTAAAGAGAGAGTCCAATT |
| | | CTCAAAGCCAATAGGCAGTAGCGAAAGCTGCAAGAGAATGA |
| | | AAATCCGTggctcgcagc |
| 231 | T75 L20b | cgctccgacccagtgcgagcaaacaaacaaaAAGACGAGGGTAAAGAGAGAG |
| | | TCCAATTCTCAAAGCCAATAGGCAGTAGCGAAAGCTGCAAGA |
| | | GAATGAAAATCCGTggctcgcagc |
| 232 | T75 L30b | cgctccgacgagcttccggccagtgcgagcaaacaaacaaaAAGACGAGGGTAAAG |
| | | AGAGAGTCCAATTCTCAAAGCCAATAGGCAGTAGCGAAAGCT |
| | | GCAAGAGAATGAAAATCCGTggctcgcagc |
| 233 | T25 L30 I0-0 | ctgaaattatacttatactcagtatatgacaaacaaaccacTAGATGACTTACAACTAA |
| | | TCGGAAGGTGCAGAGACTCGACGGGAGCTACCCTAACGTCAA |
| | | GACGAGGGTAAAGAGAGAGTCCAATTCTCAAAGCCAATAGGC |
| | | AGTAGCGAAAGCTGCAAGAGAATGAAAATCCGT |
| 234 | T25 L30a I0- | ctgaaattatacttatactcagtatatgacaaacaaaccacGGCAGTAGCGAAAGCTGC |
| | 0 | AAGAGAATGAAAATCCGT |
| 235 | T25 L30a | ctgaaattatacttatactcagtatatgacaaacaaaccacGGCAGTAGCGAAAGCTGC |
| | I25-10 | AAGAGAATGAAAATCCGTgattaaacag |
| 236 | T25 L30a | ctgaaattatacttatactcagtatatgacaaacaaaccacGGCAGTAGCGAAAGCTGC |
| | I25-20 | AAGAGAATGAAAATCCGTgattcacaatataaattacg |
| 237 | T25 L30a | ctgaaattatacttatactcagtatatgacaaacaaaccacGGCAGTAGCGAAAGCTGC |
| | I50-10 | AAGAGAATGAAAATCCGTggatcatagc |
| 238 | T25 L30a | ctgaaattatacttatactcagtatatgacaaacaaaccacGGCAGTAGCGAAAGCTGC |
| | I50-20 | AAGAGAATGAAAATCCGTggatcgcagcataatatccg |
| 239 | T25 L30a | ctgaaattatacttatactcagtatatgacaaacaaaccacGGCAGTAGCGAAAGCTGC |
| | I80-20 | AAGAGAATGAAAATCCGTggctcgcagcgcgcctaccg |
| 240 | T25 L30b I0- | ctgaaattatacttatactcagtatatgacaaacaaaccacAAGACGAGGGTAAAGAG |
| | 0 | AGAGTCCAATTCTCAAAGCCAATAGGCAGTAGCGAAAGCTGC |
| | | AAGAGAATGAAAATCCGT |
| 241 | T25 L30b | ctgaaattatacttatactcagtatatgacaaacaaaccacAAGACGAGGGTAAAGAG |
| | I25-10 | AGAGTCCAATTCTCAAAGCCAATAGGCAGTAGCGAAAGCTGC |
| | | AAGAGAATGAAAATCCGTgattaaacag |
| 242 | T25 L30b | ctgaaattatacttatactcagtatatgacaaacaaaccacAAGACGAGGGTAAAGAG |
| | I25-20 | AGAGTCCAATTCTCAAAGCCAATAGGCAGTAGCGAAAGCTGC |
| | | AAGAGAATGAAAATCCGTgattcacaatataaattacg |
| 243 | T25 L30b | ctgaaattatacttatactcagtatatgacaaacaaaccacAAGACGAGGGTAAAGAG |
| | I50-10 | AGAGTCCAATTCTCAAAGCCAATAGGCAGTAGCGAAAGCTGC |
| | | AAGAGAATGAAAATCCGTggatcatagc |
| 244 | T25 L30b | ctgaaattatacttatactcagtatatgacaaacaaaccacAAGACGAGGGTAAAGAG |
| | I50-20 | AGAGTCCAATTCTCAAAGCCAATAGGCAGTAGCGAAAGCTGC |
| | | AAGAGAATGAAAATCCGTggatcgcagcataatatccg |
| 245 | T25 L30b | ctgaaattatacttatactcagtatatgacaaacaaaccacAAGACGAGGGTAAAGAG |
| | I80-20 | AGAGTCCAATTCTCAAAGCCAATAGGCAGTAGCGAAAGCTGC |
| | | AAGAGAATGAAAATCCGTggctcgcagcgcgcctaccg |

[1250] In some embodiments, a spacer and 5′ intron fragment are spacers and fragments having sequences as listed in Table 22.

TABLE 23
Spacer and Anabaena 3′ intron fragment sequences.

| SEQ | | |
|---|---|---|
| ID NO | Spacer | Sequence |
| 246 | T25 L10 | gctgcgagccACGGACTTAAATAATTGAGCCTTAAAGAAGAAATTC |
| | | TTTAAGTGGATGCTCTCAAACTCAGGGAAACCTAAATCTAGTT |
| | | ATAGACAAGGCAATCCTGAGCCAAGCCGAAGTAGTAATTAGT |
| | | AAGTTAACAAcacaaacacaacttatatact |
| 247 | T25 L20 | gctgcgagccACGGACTTAAATAATTGAGCCTTAAAGAAGAAATTC |
| | | TTTAAGTGGATGCTCTCAAACTCAGGGAAACCTAAATCTAGTT |
| | | ATAGACAAGGCAATCCTGAGCCAAGCCGAAGTAGTAATTAGT |
| | | AAGTTAACAAcacaaacacaagagtataagtataatttcag |
| 248 | T25 L30 | gctgcgagccACGGACTTAAATAATTGAGCCTTAAAGAAGAAATTC |
| | (I80-10) | TTTAAGTGGATGCTCTCAAACTCAGGGAAACCTAAATCTAGTT |
| | [Control] | ATAGACAAGGCAATCCTGAGCCAAGCCGAAGTAGTAATTAGT |
| | | AAGTTAACAAcacaaacacaagtcatatactgagtataagtataatttcag |
| 249 | T25 L40 | gctgcgagccACGGACTTAAATAATTGAGCCTTAAAGAAGAAATTC |
| | | TTTAAGTGGATGCTCTCAAACTCAGGGAAACCTAAATCTAGTT |
| | | ATAGACAAGGCAATCCTGAGCCAAGCCGAAGTAGTAATTAGT |
| | | AAGTTAACAAcacaaacacaagtcatatactgagtataagtataatttcatattgttgatg |
| 250 | T25 L50 | gctgcgagccACGGACTTAAATAATTGAGCCTTAAAGAAGAAATTC |
| | | TTTAAGTGGATGCTCTCAAACTCAGGGAAACCTAAATCTAGTT |
| | | ATAGACAAGGCAATCCTGAGCCAAGCCGAAGTAGTAATTAGT |
| | | AAGTTAACAAcacaaacacaagcgataatgcttcatatactgagtataagtatagtttcatattg |
| | | ttgatg |
| 251 | T50 L10 | gctgcgagccACGGACTTAAATAATTGAGCCTTAAAGAAGAAATTC |
| | | TTTAAGTGGATGCTCTCAAACTCAGGGAAACCTAAATCTAGTT |
| | | ATAGACAAGGCAATCCTGAGCCAAGCCGAAGTAGTAATTAGT |
| | | AAGTTAACAAaacaaaaacaagctgacgcta |
| 252 | T50 L20 | gctgcgagccACGGACTTAAATAATTGAGCCTTAAAGAAGAAATTC |
| | | TTTAAGTGGATGCTCTCAAACTCAGGGAAACCTAAATCTAGTT |
| | | ATAGACAAGGCAATCCTGAGCCAAGCCGAAGTAGTAATTAGT |
| | | AAGTTAACAAaacaaaaacaagctgacgctagtatgagtat |
| 253 | T50 L30 | gctgcgagccACGGACTTAAATAATTGAGCCTTAAAGAAGAAATTC |
| | | TTTAAGTGGATGCTCTCAAACTCAGGGAAACCTAAATCTAGTT |
| | | ATAGACAAGGCAATCCTGAGCCAAGCCGAAGTAGTAATTAGT |
| | | AAGTTAACAAaacaaaaacaagctgacgctagtatgagtatagcttcacac |
| 254 | T50 L40 | gctgcgagccACGGACTTAAATAATTGAGCCTTAAAGAAGAAATTC |
| | | TTTAAGTGGATGCTCTCAAACTCAGGGAAACCTAAATCTAGTT |
| | | ATAGACAAGGCAATCCTGAGCCAAGCCGAAGTAGTAATTAGT |
| | | AAGTTAACAAaacaaaaacaagctgacgctagtatgagtatagcttcacactcaggtgagg |
| 255 | T50 L50 | gctgcgagccACGGACTTAAATAATTGAGCCTTAAAGAAGAAATTC |
| | | TTTAAGTGGATGCTCTCAAACTCAGGGAAACCTAAATCTAGTT |
| | | ATAGACAAGGCAATCCTGAGCCAAGCCGAAGTAGTAATTAGT |
| | | AAGTTAACAAaacaaaaacaagctgacgctagtatgagtatagcttcacactcaggtgaggc |
| | | atcattcgg |
| 256 | T75 L10 | gctgcgagccACGGACTTAAATAATTGAGCCTTAAAGAAGAAATTC |
| | | TTTAAGTGGATGCTCTCAAACTCAGGGAAACCTAAATCTAGTT |
| | | ATAGACAAGGCAATCCTGAGCCAAGCCGAAGTAGTAATTAGT |
| | | AAGTTAACAAaacaaaaacaagctcgcaccg |
| 257 | T75 L20 | gctgcgagccACGGACTTAAATAATTGAGCCTTAAAGAAGAAATTC |
| | | TTTAAGTGGATGCTCTCAAACTCAGGGAAACCTAAATCTAGTT |
| | | ATAGACAAGGCAATCCTGAGCCAAGCCGAAGTAGTAATTAGT |
| | | AAGTTAACAAaacaaaaacaagctcgcactgggtcggagcg |
| 258 | T25 L30 | gctgcgagccACGGACTTAAATAATTGAGCCTTAAAGAAGAAATTC |
| | 1MM | TTTAAGTGGATGCTCTCAAACTCAGGGAAACCTAAATCTAGTT |
| | | ATAGACAAGGCAATCCTGAGCCAAGCCGAAGTAGTAATTAGT |
| | | AAGTTAACAAcacaaacacaagtcatatactgagtataagtataatttcag |
| 259 | T25 L30 | gctgcgagccACGGACTTAAATAATTGAGCCTTAAAGAAGAAATTC |
| | 3MM | TTTAAGTGGATGCTCTCAAACTCAGGGAAACCTAAATCTAGTT |
| | | ATAGACAAGGCAATCCTGAGCCAAGCCGAAGTAGTAATTAGT |
| | | AAGTTAACAAcacaaacacaagtcatatactgagtataagtataatttcag |
| 260 | T25 L30 | gctgcgagccACGGACTTAAATAATTGAGCCTTAAAGAAGAAATTC |
| | 5MM | TTTAAGTGGATGCTCTCAAACTCAGGGAAACCTAAATCTAGTT |
| | | ATAGACAAGGCAATCCTGAGCCAAGCCGAAGTAGTAATTAGT |
| | | AAGTTAACAAcacaaacacaagtcatatactgagtataagtataatttcag |
| 261 | T25 L30 | gctgcgagccACGGACTTAAATAATTGAGCCTTAAAGAAGAAATTC |
| | 8MM | TTTAAGTGGATGCTCTCAAACTCAGGGAAACCTAAATCTAGTT |
| | | ATAGACAAGGCAATCCTGAGCCAAGCCGAAGTAGTAATTAGT |
| | | AAGTTAACAAcacaaacacaagtcatatactgagtataagtataatttcag |
| 262 | T25 L30 | gctgcgagccACGGACTTAAATAATTGAGCCTTAAAGAAGAAATTC |
| | OffTarget 10 | TTTAAGTGGATGCTCTCAAACTCAGGGAAACCTAAATCTAGTT |
| | | ATAGACAAGGCAATCCTGAGCCAAGCCGAAGTAGTAATTAGT |
| | | AAGTTAACAAcacaaacacaagtaacttagagagtataagtataatttcag |
| 263 | T25 L30 | gctgcgagccACGGACTTAAATAATTGAGCCTTAAAGAAGAAATTC |
| | OffTarget 20 | TTTAAGTGGATGCTCTCAAACTCAGGGAAACCTAAATCTAGTT |
| | | ATAGACAAGGCAATCCTGAGCCAAGCCGAAGTAGTAATTAGT |
| | | AAGTTAACAAcacaaacacaagtaacttagaTgtaacacacataatttcag |
| 264 | T25 L30 | gctgcgagccACGGACTTAAATAATTGAGCCTTAAAGAAGAAATTC |
| | OffTarget 30 | TTTAAGTGGATGCTCTCAAACTCAGGGAAACCTAAATCTAGTT |
| | | ATAGACAAGGCAATCCTGAGCCAAGCCGAAGTAGTAATTAGT |
| | | AAGTTAACAAcacaaacacaagtaacttagaTgtaacacacaccgatcaac |
| 265 | T25 L30 I25- | ctgtttaatcACGGACTTAAATAATTGAGCCTTAAAGAAGAAATTCT |
| | 10 | TTAAGTGGATGCTCTCAAACTCAGGGAAACCTAAATCTAGTT |
| | | ATAGACAAGGCAATCCTGAGCCAAGCCGAAGTAGTAATTAGT |
| | | AAGTTAACAAcacaaacacaagtcatatactgagtataagtataatttcag |
| 266 | T25 L30 I25- | cgtaatttatattgtgaatcACGGACTTAAATAATTGAGCCTTAAAGAAGA |
| | 20 | AATTCTTTAAGTGGATGCTCTCAAACTCAGGGAAACCTAAATC |
| | | TAGTTATAGACAAGGCAATCCTGAGCCAAGCCGAAGTAGTAA |
| | | TTAGTAAGTTAACAAcacaaacacaagtcatatactgagtataagtataatttcag |
| 267 | T25 L30 I50- | gctatgatccACGGACTTAAATAATTGAGCCTTAAAGAAGAAATTC |
| | 10 | TTTAAGTGGATGCTCTCAAACTCAGGGAAACCTAAATCTAGTT |
| | | ATAGACAAGGCAATCCTGAGCCAAGCCGAAGTAGTAATTAGT |
| | | AAGTTAACAAcacaaacacaagtcatatactgagtataagtataatttcag |
| 268 | T25 L30 I50- | cggatattatgctgcgatccACGGACTTAAATAATTGAGCCTTAAAGAAG |
| | 20 | AAATTCTTTAAGTGGATGCTCTCAAACTCAGGGAAACCTAAA |
| | | TCTAGTTATAGACAAGGCAATCCTGAGCCAAGCCGAAGTAGT |
| | | AATTAGTAAGTTAACAAcacaaacacaagtcatatactgagtataagtataatttcag |
| 269 | T25 L30 I80- | cggtaggcgcgctgcgagccACGGACTTAAATAATTGAGCCTTAAAGAA |
| | 20 | GAAATTCTTTAAGTGGATGCTCTCAAACTCAGGGAAACCTAA |
| | | ATCTAGTTATAGACAAGGCAATCCTGAGCCAAGCCGAAGTAG |
| | | TAATTAGTAAGTTAACAAcacaaacacaagtcatatactgagtataagtataatttcag |
| 270 | T25 L30 I80- | gcgctaacgtcgacgccggcaaacggtaggcgcgctgcgagccACGGACTTAAATAA |
| | 20x2 | TTGAGCCTTAAAGAAGAAATTCTTTAAGTGGATGCTCTCAAAC |
| | | TCAGGGAAACCTAAATCTAGTTATAGACAAGGCAATCCTGAG |
| | | CCAAGCCGAAGTAGTAATTAGTAAGTTAACAAcacaaacacaagtcat |
| | | atactgagtataagtataatttcag |
| 271 | T25 L30 I50- | gcatgtcacttgtatcctogaaacggatattatgctgcgatccACGGACTTAAATAATTG |
| | 20x2 | AGCCTTAAAGAAGAAATTCTTTAAGTGGATGCTCTCAAACTC |
| | | AGGGAAACCTAAATCTAGTTATAGACAAGGCAATCCTGAGCC |
| | | AAGCCGAAGTAGTAATTAGTAAGTTAACAAcacaaacacaagtcatatac |
| | | tgagtataagtataatttcag |
| 272 | T25 L30 I25- | gttagagttatcatttatcgaaacgtaatttagattgtgaatcACGGACTTAAATAATTGA |
| | 20x2 | GCCTTAAAGAAGAAATTCTTTAAGTGGATGCTCTCAAACTCA |
| | | GGGAAACCTAAATCTAGTTATAGACAAGGCAATCCTGAGCCA |
| | | AGCCGAAGTAGTAATTAGTAAGTTAACAAcacaaacacaagtcatatactg |
| | | agtataagtataatttcag |
| 273 | T0 L0 | gctgcgagccACGGACTTAAATAATTGAGCCTTAAAGAAGAAATTC |
| | | TTTAAGTGGATGCTCTCAAACTCAGGGAAACCTAAATCTAGTT |
| | | ATAGACAAGGCAATCCTGAGCCAAGCCGAAGTAGTAATTAGT |
| | | AAGTTAACAAcacaaacacaa |
| 274 | T100 L5 | gctgcgagccACGGACTTAAATAATTGAGCCTTAAAGAAGAAATTC |
| | | TTTAAGTGGATGCTCTCAAACTCAGGGAAACCTAAATCTAGTT |
| | | ATAGACAAGGCAATCCTGAGCCAAGCCGAAGTAGTAATTAGT |
| | | AAGTTAACAAaacaaaaacaagcccg |
| 275 | T75 L30 | gctgcgagccACGGACTTAAATAATTGAGCCTTAAAGAAGAAATTC |
| | | TTTAAGTGGATGCTCTCAAACTCAGGGAAACCTAAATCTAGTT |
| | | ATAGACAAGGCAATCCTGAGCCAAGCCGAAGTAGTAATTAGT |
| | | AAGTTAACAAaacaaaaacaagctcgcactggccggaagctcgtcggagcg |
| 276 | T0 L0a | gctgcgagccACGGACTTAAATAATTGAGCCTTAAAGAAGAAATTC |
| | | TTTAAGTGGATGCTCTCAAACTCAGGGAAACCTAAATCTAGTT |
| | | ATAGACAAGGCAATCCTGAGCCAAGCCGAAGTAGTAATTAGT |
| | | AAGTTAACAATAGATGACTTACAACTAATCGGAAGGTGCAGA |
| | | GACTCGACGGGAGCTACCCTAACGTCAAGACGAGGGTAAAGA |
| | | GAGAGTCCAATTCTCAAAGCCAATAcacaaacacaa |
| 277 | T25 L10a | gctgcgagccACGGACTTAAATAATTGAGCCTTAAAGAAGAAATTC |
| | | TTTAAGTGGATGCTCTCAAACTCAGGGAAACCTAAATCTAGTT |
| | | ATAGACAAGGCAATCCTGAGCCAAGCCGAAGTAGTAATTAGT |
| | | AAGTTAACAATAGATGACTTACAACTAATCGGAAGGTGCAGA |
| | | GACTCGACGGGAGCTACCCTAACGTCAAGACGAGGGTAAAGA |
| | | GAGAGTCCAATTCTCAAAGCCAATAcacaaacacaacttatatact |
| 278 | T25 L20a | gctgcgagccACGGACTTAAATAATTGAGCCTTAAAGAAGAAATTC |
| | | TTTAAGTGGATGCTCTCAAACTCAGGGAAACCTAAATCTAGTT |
| | | ATAGACAAGGCAATCCTGAGCCAAGCCGAAGTAGTAATTAGT |
| | | AAGTTAACAATAGATGACTTACAACTAATCGGAAGGTGCAGA |
| | | GACTCGACGGGAGCTACCCTAACGTCAAGACGAGGGTAAAGA |
| | | GAGAGTCCAATTCTCAAAGCCAATAcacaaacacaagagtataagtataatttc |
| | | ag |
| 279 | T25 L30a | gctgcgagccACGGACTTAAATAATTGAGCCTTAAAGAAGAAATTC |
| | (I80-10) | TTTAAGTGGATGCTCTCAAACTCAGGGAAACCTAAATCTAGTT |
| | [Control] | ATAGACAAGGCAATCCTGAGCCAAGCCGAAGTAGTAATTAGT |
| | | AAGTTAACAATAGATGACTTACAACTAATCGGAAGGTGCAGA |
| | | GACTCGACGGGAGCTACCCTAACGTCAAGACGAGGGTAAAGA |
| | | GAGAGTCCAATTCTCAAAGCCAATAcacaaacacaagtcatatactgagtataa |
| | | gtataatttcag |
| 280 | T50 L10a | gctgcgagccACGGACTTAAATAATTGAGCCTTAAAGAAGAAATTC |
| | | TTTAAGTGGATGCTCTCAAACTCAGGGAAACCTAAATCTAGTT |
| | | ATAGACAAGGCAATCCTGAGCCAAGCCGAAGTAGTAATTAGT |
| | | AAGTTAACAATAGATGACTTACAACTAATCGGAAGGTGCAGA |
| | | GACTCGACGGGAGCTACCCTAACGTCAAGACGAGGGTAAAGA |
| | | GAGAGTCCAATTCTCAAAGCCAATAaacaaaaacaagctgacgcta |
| 281 | T50 L20a | gctgcgagccACGGACTTAAATAATTGAGCCTTAAAGAAGAAATTC |
| | | TTTAAGTGGATGCTCTCAAACTCAGGGAAACCTAAATCTAGTT |
| | | ATAGACAAGGCAATCCTGAGCCAAGCCGAAGTAGTAATTAGT |
| | | AAGTTAACAATAGATGACTTACAACTAATCGGAAGGTGCAGA |
| | | GACTCGACGGGAGCTACCCTAACGTCAAGACGAGGGTAAAGA |
| | | GAGAGTCCAATTCTCAAAGCCAATAaacaaaaacaagctgacgctagtatga |
| | | gtat |
| 282 | T50 L30a | gctgcgagccACGGACTTAAATAATTGAGCCTTAAAGAAGAAATTC |
| | | TTTAAGTGGATGCTCTCAAACTCAGGGAAACCTAAATCTAGTT |
| | | ATAGACAAGGCAATCCTGAGCCAAGCCGAAGTAGTAATTAGT |
| | | AAGTTAACAATAGATGACTTACAACTAATCGGAAGGTGCAGA |
| | | GACTCGACGGGAGCTACCCTAACGTCAAGACGAGGGTAAAGA |
| | | GAGAGTCCAATTCTCAAAGCCAATAaacaaaaacaagctgacgctagtatga |
| | | gtatagcttcacac |
| 283 | T75 L10a | gctgcgagccACGGACTTAAATAATTGAGCCTTAAAGAAGAAATTC |
| | | TTTAAGTGGATGCTCTCAAACTCAGGGAAACCTAAATCTAGTT |
| | | ATAGACAAGGCAATCCTGAGCCAAGCCGAAGTAGTAATTAGT |
| | | AAGTTAACAATAGATGACTTACAACTAATCGGAAGGTGCAGA |
| | | GACTCGACGGGAGCTACCCTAACGTCAAGACGAGGGTAAAGA |
| | | GAGAGTCCAATTCTCAAAGCCAATAaacaaaaacaagctogcaccg |
| 284 | T75 L20a | gctgcgagccACGGACTTAAATAATTGAGCCTTAAAGAAGAAATTC |
| | | TTTAAGTGGATGCTCTCAAACTCAGGGAAACCTAAATCTAGTT |
| | | ATAGACAAGGCAATCCTGAGCCAAGCCGAAGTAGTAATTAGT |
| | | AAGTTAACAATAGATGACTTACAACTAATCGGAAGGTGCAGA |
| | | GACTCGACGGGAGCTACCCTAACGTCAAGACGAGGGTAAAGA |
| | | GAGAGTCCAATTCTCAAAGCCAATAaacaaaaacaagctcgcactgggtcgg |
| | | agcg |
| 285 | T75 L30a | gctgcgagccACGGACTTAAATAATTGAGCCTTAAAGAAGAAATTC |
| | | TTTAAGTGGATGCTCTCAAACTCAGGGAAACCTAAATCTAGTT |
| | | ATAGACAAGGCAATCCTGAGCCAAGCCGAAGTAGTAATTAGT |
| | | AAGTTAACAATAGATGACTTACAACTAATCGGAAGGTGCAGA |
| | | GACTCGACGGGAGCTACCCTAACGTCAAGACGAGGGTAAAGA |
| | | GAGAGTCCAATTCTCAAAGCCAATAaacaaaaacaagctcgcactggccgga |
| | | agctcgtcggagcg |
| 286 | T0 L0b | gctgcgagccACGGACTTAAATAATTGAGCCTTAAAGAAGAAATTC |
| | | TTTAAGTGGATGCTCTCAAACTCAGGGAAACCTAAATCTAGTT |
| | | ATAGACAAGGCAATCCTGAGCCAAGCCGAAGTAGTAATTAGT |
| | | AAGTTAACAATAGATGACTTACAACTAATCGGAAGGTGCAGA |
| | | GACTCGACGGGAGCTACCCTAACGTCcacaaacacaa |
| 287 | T25 L10b | gctgcgagccACGGACTTAAATAATTGAGCCTTAAAGAAGAAATTC |
| | | TTTAAGTGGATGCTCTCAAACTCAGGGAAACCTAAATCTAGTT |
| | | ATAGACAAGGCAATCCTGAGCCAAGCCGAAGTAGTAATTAGT |
| | | AAGTTAACAATAGATGACTTACAACTAATCGGAAGGTGCAGA |
| | | GACTCGACGGGAGCTACCCTAACGTCcacaaacacaacttatatact |
| 288 | T25 L20b | gctgcgagccACGGACTTAAATAATTGAGCCTTAAAGAAGAAATTC |
| | | TTTAAGTGGATGCTCTCAAACTCAGGGAAACCTAAATCTAGTT |
| | | ATAGACAAGGCAATCCTGAGCCAAGCCGAAGTAGTAATTAGT |
| | | AAGTTAACAATAGATGACTTACAACTAATCGGAAGGTGCAGA |
| | | GACTCGACGGGAGCTACCCTAACGTCcacaaacacaagagtataagtataatt |
| | | tcag |
| 289 | T25 L30b | gctgcgagccACGGACTTAAATAATTGAGCCTTAAAGAAGAAATTC |
| | (I80-10) | TTTAAGTGGATGCTCTCAAACTCAGGGAAACCTAAATCTAGTT |
| | [Control] | ATAGACAAGGCAATCCTGAGCCAAGCCGAAGTAGTAATTAGT |
| | | AAGTTAACAATAGATGACTTACAACTAATCGGAAGGTGCAGA |
| | | GACTCGACGGGAGCTACCCTAACGTCcacaaacacaagtcatatactgagtat |
| | | aagtataatttcag |
| 290 | T50 L10b | gctgcgagccACGGACTTAAATAATTGAGCCTTAAAGAAGAAATTC |
| | | TTTAAGTGGATGCTCTCAAACTCAGGGAAACCTAAATCTAGTT |
| | | ATAGACAAGGCAATCCTGAGCCAAGCCGAAGTAGTAATTAGT |
| | | AAGTTAACAATAGATGACTTACAACTAATCGGAAGGTGCAGA |
| | | GACTCGACGGGAGCTACCCTAACGTCaacaaaaacaagctgacgcta |
| 291 | T50 L20b | gctgcgagccACGGACTTAAATAATTGAGCCTTAAAGAAGAAATTC |
| | | TTTAAGTGGATGCTCTCAAACTCAGGGAAACCTAAATCTAGTT |
| | | ATAGACAAGGCAATCCTGAGCCAAGCCGAAGTAGTAATTAGT |
| | | AAGTTAACAATAGATGACTTACAACTAATCGGAAGGTGCAGA |
| | | GACTCGACGGGAGCTACCCTAACGTCaacaaaaacaagctgacgctagtatg |
| | | agtat |
| 292 | T50 L30b | gctgcgagccACGGACTTAAATAATTGAGCCTTAAAGAAGAAATTC |
| | | TTTAAGTGGATGCTCTCAAACTCAGGGAAACCTAAATCTAGTT |
| | | ATAGACAAGGCAATCCTGAGCCAAGCCGAAGTAGTAATTAGT |
| | | AAGTTAACAATAGATGACTTACAACTAATCGGAAGGTGCAGA |
| | | GACTCGACGGGAGCTACCCTAACGTCaacaaaaacaagctgacgctagtatg |
| | | agtatagcttcacac |
| 293 | T75 L10b | gctgcgagccACGGACTTAAATAATTGAGCCTTAAAGAAGAAATTC |
| | | TTTAAGTGGATGCTCTCAAACTCAGGGAAACCTAAATCTAGTT |
| | | ATAGACAAGGCAATCCTGAGCCAAGCCGAAGTAGTAATTAGT |
| | | AAGTTAACAATAGATGACTTACAACTAATCGGAAGGTGCAGA |
| | | GACTCGACGGGAGCTACCCTAACGTCaacaaaaacaagctogcaccg |
| 294 | T75 L20b | gctgcgagccACGGACTTAAATAATTGAGCCTTAAAGAAGAAATTC |
| | | TTTAAGTGGATGCTCTCAAACTCAGGGAAACCTAAATCTAGTT |
| | | ATAGACAAGGCAATCCTGAGCCAAGCCGAAGTAGTAATTAGT |
| | | AAGTTAACAATAGATGACTTACAACTAATCGGAAGGTGCAGA |
| | | GACTCGACGGGAGCTACCCTAACGTCaacaaaaacaagctcgcactgggtcg |
| | | gagcg |
| 295 | T75 L30b | gctgcgagccACGGACTTAAATAATTGAGCCTTAAAGAAGAAATTC |
| | | TTTAAGTGGATGCTCTCAAACTCAGGGAAACCTAAATCTAGTT |
| | | ATAGACAAGGCAATCCTGAGCCAAGCCGAAGTAGTAATTAGT |
| | | AAGTTAACAATAGATGACTTACAACTAATCGGAAGGTGCAGA |
| | | GACTCGACGGGAGCTACCCTAACGTCaacaaaaacaagctcgcactggccg |
| | | gaagctcgtcggagcg |
| 296 | T25 L30 I0-0 | ACGGACTTAAATAATTGAGCCTTAAAGAAGAAATTCTTTAAG |
| | | TGGATGCTCTCAAACTCAGGGAAACCTAAATCTAGTTATAGA |
| | | CAAGGCAATCCTGAGCCAAGCCGAAGTAGTAATTAGTAAGTT |
| | | AACAAcacaaacacaagtcatatactgagtataagtataatttcag |
| 297 | T25 L30a I0- | ACGGACTTAAATAATTGAGCCTTAAAGAAGAAATTCTTTAAG |
| | 0 | TGGATGCTCTCAAACTCAGGGAAACCTAAATCTAGTTATAGA |
| | | CAAGGCAATCCTGAGCCAAGCCGAAGTAGTAATTAGTAAGTT |
| | | AACAATAGATGACTTACAACTAATCGGAAGGTGCAGAGACTC |
| | | GACGGGAGCTACCCTAACGTCAAGACGAGGGTAAAGAGAGA |
| | | GTCCAATTCTCAAAGCCAATAcacaaacacaagtcatatactgagtataagtataat |
| | | ttcag |
| 298 | T25 L30a | ctgtttaatcACGGACTTAAATAATTGAGCCTTAAAGAAGAAATTCT |
| | I25-10 | TTAAGTGGATGCTCTCAAACTCAGGGAAACCTAAATCTAGTT |
| | | ATAGACAAGGCAATCCTGAGCCAAGCCGAAGTAGTAATTAGT |
| | | AAGTTAACAATAGATGACTTACAACTAATCGGAAGGTGCAGA |
| | | GACTCGACGGGAGCTACCCTAACGTCAAGACGAGGGTAAAGA |
| | | GAGAGTCCAATTCTCAAAGCCAATAcacaaacacaagtcatatactgagtataa |
| | | gtataatttcag |
| 299 | T25 L30a | cgtaatttatattgtgaatcACGGACTTAAATAATTGAGCCTTAAAGAAGA |
| | I25-20 | AATTCTTTAAGTGGATGCTCTCAAACTCAGGGAAACCTAAATC |
| | | TAGTTATAGACAAGGCAATCCTGAGCCAAGCCGAAGTAGTAA |
| | | TTAGTAAGTTAACAATAGATGACTTACAACTAATCGGAAGGT |
| | | GCAGAGACTCGACGGGAGCTACCCTAACGTCAAGACGAGGGT |
| | | AAAGAGAGAGTCCAATTCTCAAAGCCAATAcacaaacacaagtcatatac |
| | | tgagtataagtataatttcag |
| 300 | T25 L30a | gctatgatccACGGACTTAAATAATTGAGCCTTAAAGAAGAAATTC |
| | I50-10 | TTTAAGTGGATGCTCTCAAACTCAGGGAAACCTAAATCTAGTT |
| | | ATAGACAAGGCAATCCTGAGCCAAGCCGAAGTAGTAATTAGT |
| | | AAGTTAACAATAGATGACTTACAACTAATCGGAAGGTGCAGA |
| | | GACTCGACGGGAGCTACCCTAACGTCAAGACGAGGGTAAAGA |
| | | GAGAGTCCAATTCTCAAAGCCAATAcacaaacacaagtcatatactgagtataa |
| | | gtataatttcag |
| 301 | T25 L30a | cggatattatgctgcgatccACGGACTTAAATAATTGAGCCTTAAAGAAG |
| | I50-20 | AAATTCTTTAAGTGGATGCTCTCAAACTCAGGGAAACCTAAA |
| | | TCTAGTTATAGACAAGGCAATCCTGAGCCAAGCCGAAGTAGT |
| | | AATTAGTAAGTTAACAATAGATGACTTACAACTAATCGGAAG |
| | | GTGCAGAGACTCGACGGGAGCTACCCTAACGTCAAGACGAGG |
| | | GTAAAGAGAGAGTCCAATTCTCAAAGCCAATAcacaaacacaagtcat |
| | | atactgagtataagtataatttcag |
| 302 | T25 L30a | cggtaggcgcgctgcgagccACGGACTTAAATAATTGAGCCTTAAAGAA |
| | I80-20 | GAAATTCTTTAAGTGGATGCTCTCAAACTCAGGGAAACCTAA |
| | | ATCTAGTTATAGACAAGGCAATCCTGAGCCAAGCCGAAGTAG |
| | | TAATTAGTAAGTTAACAATAGATGACTTACAACTAATCGGAA |
| | | GGTGCAGAGACTCGACGGGAGCTACCCTAACGTCAAGACGAG |
| | | GGTAAAGAGAGAGTCCAATTCTCAAAGCCAATAcacaaacacaagtc |
| | | atatactgagtataagtataatttcag |
| 303 | T25 L30b I0- | ACGGACTTAAATAATTGAGCCTTAAAGAAGAAATTCTTTAAG |
| | 0 | TGGATGCTCTCAAACTCAGGGAAACCTAAATCTAGTTATAGA |
| | | CAAGGCAATCCTGAGCCAAGCCGAAGTAGTAATTAGTAAGTT |
| | | AACAATAGATGACTTACAACTAATCGGAAGGTGCAGAGACTC |
| | | GACGGGAGCTACCCTAACGTCcacaaacacaagtcatatactgagtataagtataat |
| | | ttcag |
| 304 | T25 L30b | ctgtttaatcACGGACTTAAATAATTGAGCCTTAAAGAAGAAATTCT |
| | I25-10 | TTAAGTGGATGCTCTCAAACTCAGGGAAACCTAAATCTAGTT |
| | | ATAGACAAGGCAATCCTGAGCCAAGCCGAAGTAGTAATTAGT |
| | | AAGTTAACAATAGATGACTTACAACTAATCGGAAGGTGCAGA |
| | | GACTCGACGGGAGCTACCCTAACGTCcacaaacacaagtcatatactgagtat |
| | | aagtataatttcag |
| 305 | T25 L30b | cgtaatttatattgtgaatcACGGACTTAAATAATTGAGCCTTAAAGAAGA |
| | I25-20 | AATTCTTTAAGTGGATGCTCTCAAACTCAGGGAAACCTAAATC |
| | | TAGTTATAGACAAGGCAATCCTGAGCCAAGCCGAAGTAGTAA |
| | | TTAGTAAGTTAACAATAGATGACTTACAACTAATCGGAAGGT |
| | | GCAGAGACTCGACGGGAGCTACCCTAACGTCcacaaacacaagtcatat |
| | | actgagtataagtataatttcag |
| 306 | T25 L30b | gctatgatccACGGACTTAAATAATTGAGCCTTAAAGAAGAAATTC |
| | I50-10 | TTTAAGTGGATGCTCTCAAACTCAGGGAAACCTAAATCTAGTT |
| | | ATAGACAAGGCAATCCTGAGCCAAGCCGAAGTAGTAATTAGT |
| | | AAGTTAACAATAGATGACTTACAACTAATCGGAAGGTGCAGA |
| | | GACTCGACGGGAGCTACCCTAACGTCcacaaacacaagtcatatactgagtat |
| | | aagtataatttcag |
| 307 | T25 L30b | cggatattatgctgcgatccACGGACTTAAATAATTGAGCCTTAAAGAAG |
| | I50-20 | AAATTCTTTAAGTGGATGCTCTCAAACTCAGGGAAACCTAAA |
| | | TCTAGTTATAGACAAGGCAATCCTGAGCCAAGCCGAAGTAGT |
| | | AATTAGTAAGTTAACAATAGATGACTTACAACTAATCGGAAG |
| | | GTGCAGAGACTCGACGGGAGCTACCCTAACGTCcacaaacacaagtc |
| | | atatactgagtataagtataatttcag |
| 308 | T25 L30b | cggtaggcgcgctgcgagccACGGACTTAAATAATTGAGCCTTAAAGAA |
| | I80-20 | GAAATTCTTTAAGTGGATGCTCTCAAACTCAGGGAAACCTAA |
| | | ATCTAGTTATAGACAAGGCAATCCTGAGCCAAGCCGAAGTAG |
| | | TAATTAGTAAGTTAACAATAGATGACTTACAACTAATCGGAA |
| | | GGTGCAGAGACTCGACGGGAGCTACCCTAACGTCcacaaacacaagt |
| | | catatactgagtataagtataatttcag |

[1251] In some embodiments, a spacer and 3′ intron fragment is a spacer and intron fragment having sequences as listed in Table 23.

TABLE 24
CAR sequences

| SEQ | | |
|---|---|---|
| ID NO | CAR | Sequence |
| 309 | FMC63-4- | ATGCTGCTGCTGGTCACATCTCTGCTGCTGTGCGAGCTGCCCC |
| | 1BB | ATCCTGCCTTTCTGCTGATCCCCGACATCCAGATGACCCAGAC |
| | | CACAAGCAGCCTGTCTGCCAGCCTGGGCGATAGAGTGACCAT |
| | | CAGCTGTAGAGCCAGCCAGGACATCAGCAAGTACCTGAACTG |
| | | GTATCAGCAAAAGCCCGACGGCACCGTGAAGCTGCTGATCTA |
| | | CCACACCAGCAGACTGCACAGCGGCGTGCCAAGCAGATTTTC |
| | | TGGCAGCGGCTCTGGCACCGACTACAGCCTGACAATCAGCAA |
| | | CCTGGAACAAGAGGATATCGCTACCTACTTCTGCCAGCAAGG |
| | | CAACACCCTGCCTTACACCTTTGGCGGAGGCACCAAGCTGGA |
| | | AATCACCGGCTCTACAAGCGGCAGCGGCAAACCTGGATCTGG |
| | | CGAGGGATCTACCAAGGGCGAAGTGAAACTGCAAGAGTCTG |
| | | GCCCTGGACTGGTGGCCCCATCTCAGTCTCTGAGCGTGACCTG |
| | | TACAGTCAGCGGAGTGTCCCTGCCTGATTACGGCGTGTCCTG |
| | | GATCAGACAGCCTCCTCGGAAAGGCCTGGAATGGCTGGGAGT |
| | | GATCTGGGGCAGCGAGACAACCTACTACAACAGCGCCCTGAA |
| | | GTCCCGGCTGACCATCATCAAGGACAACTCCAAGAGCCAGGT |
| | | GTTCCTGAAGATGAACAGCCTGCAGACCGACGACACCGCCAT |
| | | CTACTATTGCGCCAAGCACTACTACTACGGCGGCAGCTACGC |
| | | CATGGATTATTGGGGCCAGGGCACCAGCGTGACCGTTTCTTCT |
| | | GCCGCCGCTATCGAAGTGATGTACCCTCCTCCTTACCTGGACA |
| | | ACGAGAAGTCCAACGGCACCATCATCCACGTGAAGGGCAAG |
| | | CACCTGTGTCCTTCTCCACTGTTCCCCGGACCTAGCAAGCCTT |
| | | TCTGGGTGCTCGTTGTTGTTGGCGGCGTGCTGGCCTGTTACAG |
| | | CCTGCTGGTTACCGTGGCCTTCATCATCTTTTGGGTCAAGAGA |
| | | GGCCGGAAGAAACTTCTTTATATATTCAAGCAGCCCTTTATGC |
| | | GACCCGTTCAGACTACCCAAGAGGAAGATGGATGCAGTTGCC |
| | | GCTTTCCAGAAGAGGAGGAGGGCGGGTGCGAACTGtaa |
| 310 | FMC63-CD28 | ATGCTGCTGCTGGTCACATCTCTGCTGCTGTGCGAGCTGCCCC |
| | | ATCCTGCCTTTCTGCTGATCCCCGACATCCAGATGACCCAGAC |
| | | CACAAGCAGCCTGTCTGCCAGCCTGGGCGATAGAGTGACCAT |
| | | CAGCTGTAGAGCCAGCCAGGACATCAGCAAGTACCTGAACTG |
| | | GTATCAGCAAAAGCCCGACGGCACCGTGAAGCTGCTGATCTA |
| | | CCACACCAGCAGACTGCACAGCGGCGTGCCAAGCAGATTTTC |
| | | TGGCAGCGGCTCTGGCACCGACTACAGCCTGACAATCAGCAA |
| | | CCTGGAACAAGAGGATATCGCTACCTACTTCTGCCAGCAAGG |
| | | CAACACCCTGCCTTACACCTTTGGCGGAGGCACCAAGCTGGA |
| | | AATCACCGGCTCTACAAGCGGCAGCGGCAAACCTGGATCTGG |
| | | CGAGGGATCTACCAAGGGCGAAGTGAAACTGCAAGAGTCTG |
| | | GCCCTGGACTGGTGGCCCCATCTCAGTCTCTGAGCGTGACCTG |
| | | TACAGTCAGCGGAGTGTCCCTGCCTGATTACGGCGTGTCCTG |
| | | GATCAGACAGCCTCCTCGGAAAGGCCTGGAATGGCTGGGAGT |
| | | GATCTGGGGCAGCGAGACAACCTACTACAACAGCGCCCTGAA |
| | | GTCCCGGCTGACCATCATCAAGGACAACTCCAAGAGCCAGGT |
| | | GTTCCTGAAGATGAACAGCCTGCAGACCGACGACACCGCCAT |
| | | CTACTATTGCGCCAAGCACTACTACTACGGCGGCAGCTACGC |
| | | CATGGATTATTGGGGCCAGGGCACCAGCGTGACCGTTTCTTCT |
| | | GCCGCCGCTATCGAAGTGATGTACCCTCCTCCTTACCTGGACA |
| | | ACGAGAAGTCCAACGGCACCATCATCCACGTGAAGGGCAAG |
| | | CACCTGTGTCCTTCTCCACTGTTCCCCGGACCTAGCAAGCCTT |
| | | TCTGGGTGCTCGTTGTTGTTGGCGGCGTGCTGGCCTGTTACAG |
| | | CCTGCTGGTTACCGTGGCCTTCATCATCTTTTGGGTCCGAAGC |
| | | AAGCGGAGCCGGCTGCTGCACTCCGACTACATGAACATGACC |
| | | CCTAGACGGCCCGGACCAACCAGAAAGCACTACCAGCCTTAC |
| | | GCTCCTCCTAGAGACTTCGCCGCCTACCGGTCCtaa |
| 311 | FMC63- | ATGCTGCTGCTGGTCACATCTCTGCTGCTGTGCGAGCTGCCCC |
| | CD28-zeta | ATCCTGCCTTTCTGCTGATCCCCGACATCCAGATGACCCAGAC |
| | | CACAAGCAGCCTGTCTGCCAGCCTGGGCGATAGAGTGACCAT |
| | | CAGCTGTAGAGCCAGCCAGGACATCAGCAAGTACCTGAACTG |
| | | GTATCAGCAAAAGCCCGACGGCACCGTGAAGCTGCTGATCTA |
| | | CCACACCAGCAGACTGCACAGCGGCGTGCCAAGCAGATTTTC |
| | | TGGCAGCGGCTCTGGCACCGACTACAGCCTGACAATCAGCAA |
| | | CCTGGAACAAGAGGATATCGCTACCTACTTCTGCCAGCAAGG |
| | | CAACACCCTGCCTTACACCTTTGGCGGAGGCACCAAGCTGGA |
| | | AATCACCGGCTCTACAAGCGGCAGCGGCAAACCTGGATCTGG |
| | | CGAGGGATCTACCAAGGGCGAAGTGAAACTGCAAGAGTCTG |
| | | GCCCTGGACTGGTGGCCCCATCTCAGTCTCTGAGCGTGACCTG |
| | | TACAGTCAGCGGAGTGTCCCTGCCTGATTACGGCGTGTCCTG |
| | | GATCAGACAGCCTCCTCGGAAAGGCCTGGAATGGCTGGGAGT |
| | | GATCTGGGGCAGCGAGACAACCTACTACAACAGCGCCCTGAA |
| | | GTCCCGGCTGACCATCATCAAGGACAACTCCAAGAGCCAGGT |
| | | GTTCCTGAAGATGAACAGCCTGCAGACCGACGACACCGCCAT |
| | | CTACTATTGCGCCAAGCACTACTACTACGGCGGCAGCTACGC |
| | | CATGGATTATTGGGGCCAGGGCACCAGCGTGACCGTTTCTTCT |
| | | GCCGCCGCTATCGAAGTGATGTACCCTCCTCCTTACCTGGACA |
| | | ACGAGAAGTCCAACGGCACCATCATCCACGTGAAGGGCAAG |
| | | CACCTGTGTCCTTCTCCACTGTTCCCCGGACCTAGCAAGCCTT |
| | | TCTGGGTGCTCGTTGTTGTTGGCGGCGTGCTGGCCTGTTACAG |
| | | CCTGCTGGTTACCGTGGCCTTCATCATCTTTTGGGTCCGAAGC |
| | | AAGCGGAGCCGGCTGCTGCACTCCGACTACATGAACATGACC |
| | | CCTAGACGGCCCGGACCAACCAGAAAGCACTACCAGCCTTAC |
| | | GCTCCTCCTAGAGACTTCGCCGCCTACCGGTCCAGAGTGAAG |
| | | TTCAGCAGATCCGCCGATGCTCCCGCCTATCAGCAGGGCCAA |
| | | AACCAGCTGTACAACGAGCTGAACCTGGGGAGAAGAGAAGA |
| | | GTACGACGTGCTGGACAAGCGGAGAGGCAGAGATCCTGAAA |
| | | TGGGCGGCAAGCCCAGACGGAAGAATCCTCAAGAGGGCCTG |
| | | TATAATGAGCTGCAGAAAGACAAGATGGCCGAGGCCTACAG |
| | | CGAGATCGGAATGAAGGGCGAGCGCAGAAGAGGCAAGGGAC |
| | | ACGATGGACTGTACCAGGGACTGAGCACCGCCACCAAGGATA |
| | | CCTATGACGCCCTGCACATGCAGGCCCTGCCTCCAAGAtaa |
| 312 | FMC63-zeta | ATGCTGCTGCTGGTCACATCTCTGCTGCTGTGCGAGCTGCCCC |
| | | ATCCTGCCTTTCTGCTGATCCCCGACATCCAGATGACCCAGAC |
| | | CACAAGCAGCCTGTCTGCCAGCCTGGGCGATAGAGTGACCAT |
| | | CAGCTGTAGAGCCAGCCAGGACATCAGCAAGTACCTGAACTG |
| | | GTATCAGCAAAAGCCCGACGGCACCGTGAAGCTGCTGATCTA |
| | | CCACACCAGCAGACTGCACAGCGGCGTGCCAAGCAGATTTTC |
| | | TGGCAGCGGCTCTGGCACCGACTACAGCCTGACAATCAGCAA |
| | | CCTGGAACAAGAGGATATCGCTACCTACTTCTGCCAGCAAGG |
| | | CAACACCCTGCCTTACACCTTTGGCGGAGGCACCAAGCTGGA |
| | | AATCACCGGCTCTACAAGCGGCAGCGGCAAACCTGGATCTGG |
| | | CGAGGGATCTACCAAGGGCGAAGTGAAACTGCAAGAGTCTG |
| | | GCCCTGGACTGGTGGCCCCATCTCAGTCTCTGAGCGTGACCTG |
| | | TACAGTCAGCGGAGTGTCCCTGCCTGATTACGGCGTGTCCTG |
| | | GATCAGACAGCCTCCTCGGAAAGGCCTGGAATGGCTGGGAGT |
| | | GATCTGGGGCAGCGAGACAACCTACTACAACAGCGCCCTGAA |
| | | GTCCCGGCTGACCATCATCAAGGACAACTCCAAGAGCCAGGT |
| | | GTTCCTGAAGATGAACAGCCTGCAGACCGACGACACCGCCAT |
| | | CTACTATTGCGCCAAGCACTACTACTACGGCGGCAGCTACGC |
| | | CATGGATTATTGGGGCCAGGGCACCAGCGTGACCGTTTCTTCT |
| | | GCCGCCGCTATCGAAGTGATGTACCCTCCTCCTTACCTGGACA |
| | | ACGAGAAGTCCAACGGCACCATCATCCACGTGAAGGGCAAG |
| | | CACCTGTGTCCTTCTCCACTGTTCCCCGGACCTAGCAAGCCTT |
| | | TCTGGGTGCTCGTTGTTGTTGGCGGCGTGCTGGCCTGTTACAG |
| | | CCTGCTGGTTACCGTGGCCTTCATCATCTTTTGGGTCAGAGTG |
| | | AAGTTCAGCAGATCCGCCGATGCTCCCGCCTATCAGCAGGGC |
| | | CAAAACCAGCTGTACAACGAGCTGAACCTGGGGAGAAGAGA |
| | | AGAGTACGACGTGCTGGACAAGCGGAGAGGCAGAGATCCTG |
| | | AAATGGGCGGCAAGCCCAGACGGAAGAATCCTCAAGAGGGC |
| | | CTGTATAATGAGCTGCAGAAAGACAAGATGGCCGAGGCCTAC |
| | | AGCGAGATCGGAATGAAGGGCGAGCGCAGAAGAGGCAAGGG |
| | | ACACGATGGACTGTACCAGGGACTGAGCACCGCCACCAAGG |
| | | ATACCTATGACGCCCTGCACATGCAGGCCCTGCCTCCAAGAtaa |
| 313 | CircKymriah- | ATGGCTCTCCCGGTCACAGCCCTTCTCCTGCCCCTGGCACTCT |
| | Q388 | TGCTGCATGCGGCACGACCCGACATCCAGATGACCCAGACCA |
| | | CAAGCAGCCTGTCTGCCAGCCTGGGCGATAGAGTGACCATCA |
| | | GCTGTAGAGCCAGCCAGGACATCAGCAAGTACCTGAACTGGT |
| | | ATCAGCAAAAGCCCGACGGCACCGTGAAGCTGCTGATCTACC |
| | | ACACCAGCAGACTGCACAGCGGCGTGCCAAGCAGATTTTCTG |
| | | GCAGCGGCTCTGGCACCGACTACAGCCTGACAATCAGCAACC |
| | | TGGAACAAGAGGATATCGCTACCTACTTCTGCCAGCAAGGCA |
| | | ACACCCTGCCTTACACCTTTGGCGGAGGCACCAAGCTGGAAA |
| | | TCACCGGTGGAGGTGGTTCTGGCGGAGGGGGATCTGGTGGAG |
| | | GCGGTTCAGAAGTGAAACTGCAAGAGTCTGGCCCTGGACTGG |
| | | TGGCCCCATCTCAGTCTCTGAGCGTGACCTGTACAGTCAGCG |
| | | GAGTGTCCCTGCCTGATTACGGCGTGTCCTGGATCAGACAGC |
| | | CTCCTCGGAAAGGCCTGGAATGGCTGGGAGTGATCTGGGGCA |
| | | GCGAGACAACCTACTACAACAGCGCCCTGAAGTCCCGGCTGA |
| | | CCATCATCAAGGACAACTCCAAGAGCCAGGTGTTCCTGAAGA |
| | | TGAACAGCCTGCAGACCGACGACACCGCCATCTACTATTGCG |
| | | CCAAGCACTACTACTACGGCGGCAGCTACGCCATGGATTATT |
| | | GGGGCCAGGGCACCAGCGTGACCGTTTCTTCTACCACAACGC |
| | | CCGCCCCGCGACCGCCTACTCCCGCTCCCACAATTGCATCACA |
| | | ACCCCTGTCTTTGAGACCCGAAGCTTGTCGACCAGCTGCCGGT |
| | | GGCGCGGTTCACACGCGGGGGCTCGATTTCGCCTGTGATATA |
| | | TATATATGGGCCCCATTGGCTGGAACATGCGGAGTATTGCTTC |
| | | TGAGCCTGGTGATTACCCTCTACTGTAAGAGAGGCCGGAAGA |
| | | AACTTCTTTATATATTCAAGCAGCCCTTTATGCGACCCGTTCA |
| | | GACTACCCAAGAGGAAGATGGATGCAGTTGCCGCTTTCCAGA |
| | | AGAGGAGGAGGGCGGGTGCGAACTGAGAGTGAAGTTCAGCA |
| | | GATCCGCCGATGCTCCCGCCTATCAGCAGGGCCAAAACCAGC |
| | | TGTACAACGAGCTGAACCTGGGGAGAAGAGAAGAGTACGAC |
| | | GTGCTGGACAAGCGGAGAGGCAGAGATCCTGAAATGGGCGG |
| | | CAAGCCCAGACGGAAGAATCCTCAAGAGGGCCTGTATAATGA |
| | | GCTGCAGAAAGACAAGATGGCCGAGGCCTACAGCGAGATCG |
| | | GAATGAAGGGCGAGCGCAGAAGAGGCAAGGGACACGATGGA |
| | | CTGTACCAGGGACTGAGCACCGCCACCAAGGATACCTATGAC |
| | | GCCCTGCACATGCAGGCCCTGCCTCCAAGAtaa |
| 314 | CircKymriah- | ATGGCTCTCCCGGTCACAGCCCTTCTCCTGCCCCTGGCACTCT |
| | K388 | TGCTGCATGCGGCACGACCCGACATCCAGATGACCCAGACCA |
| | | CAAGCAGCCTGTCTGCCAGCCTGGGCGATAGAGTGACCATCA |
| | | GCTGTAGAGCCAGCCAGGACATCAGCAAGTACCTGAACTGGT |
| | | ATCAGCAAAAGCCCGACGGCACCGTGAAGCTGCTGATCTACC |
| | | ACACCAGCAGACTGCACAGCGGCGTGCCAAGCAGATTTTCTG |
| | | GCAGCGGCTCTGGCACCGACTACAGCCTGACAATCAGCAACC |
| | | TGGAACAAGAGGATATCGCTACCTACTTCTGCCAGCAAGGCA |
| | | ACACCCTGCCTTACACCTTTGGCGGAGGCACCAAGCTGGAAA |
| | | TCACCGGTGGAGGTGGTTCTGGCGGAGGGGGATCTGGTGGAG |
| | | GCGGTTCAGAAGTGAAACTGCAAGAGTCTGGCCCTGGACTGG |
| | | TGGCCCCATCTCAGTCTCTGAGCGTGACCTGTACAGTCAGCG |
| | | GAGTGTCCCTGCCTGATTACGGCGTGTCCTGGATCAGACAGC |
| | | CTCCTCGGAAAGGCCTGGAATGGCTGGGAGTGATCTGGGGCA |
| | | GCGAGACAACCTACTACAACAGCGCCCTGAAGTCCCGGCTGA |
| | | CCATCATCAAGGACAACTCCAAGAGCCAGGTGTTCCTGAAGA |
| | | TGAACAGCCTGCAGACCGACGACACCGCCATCTACTATTGCG |
| | | CCAAGCACTACTACTACGGCGGCAGCTACGCCATGGATTATT |
| | | GGGGCCAGGGCACCAGCGTGACCGTTTCTTCTACCACAACGC |
| | | CCGCCCCGCGACCGCCTACTCCCGCTCCCACAATTGCATCACA |
| | | ACCCCTGTCTTTGAGACCCGAAGCTTGTCGACCAGCTGCCGGT |
| | | GGCGCGGTTCACACGCGGGGGCTCGATTTCGCCTGTGATATA |
| | | TATATATGGGCCCCATTGGCTGGAACATGCGGAGTATTGCTTC |
| | | TGAGCCTGGTGATTACCCTCTACTGTAAGAGAGGCCGGAAGA |
| | | AACTTCTTTATATATTCAAGCAGCCCTTTATGCGACCCGTTCA |
| | | GACTACCCAAGAGGAAGATGGATGCAGTTGCCGCTTTCCAGA |
| | | AGAGGAGGAGGGCGGGTGCGAACTGAGAGTGAAGTTCAGCA |
| | | GATCCGCCGATGCTCCCGCCTATAAGCAGGGCCAAAACCAGC |
| | | TGTACAACGAGCTGAACCTGGGGAGAAGAGAAGAGTACGAC |
| | | GTGCTGGACAAGCGGAGAGGCAGAGATCCTGAAATGGGCGG |
| | | CAAGCCCAGACGGAAGAATCCTCAAGAGGGCCTGTATAATGA |
| | | GCTGCAGAAAGACAAGATGGCCGAGGCCTACAGCGAGATCG |
| | | GAATGAAGGGCGAGCGCAGAAGAGGCAAGGGACACGATGGA |
| | | CTGTACCAGGGACTGAGCACCGCCACCAAGGATACCTATGAC |
| | | GCCCTGCACATGCAGGCCCTGCCTCCAAGAtaa |
| 315 | CircM971- | ATGCTGCTGCTGGTCACATCTCTGCTGCTGTGCGAGCTGCCCC |
| | CD22 | ATCCTGCCTTTCTGCTGATCCCCCAGGTTCAACTCCAGCAGTC |
| | | TGGTCCCGGCCTCGTTAAACCAAGCCAGACTTTGTCTCTTACC |
| | | TGTGCTATCAGTGGCGATAGCGTGTCTAGTAATTCAGCCGCAT |
| | | GGAACTGGATCCGACAATCACCGAGTAGGGGACTTGAATGGC |
| | | TGGGTAGAACCTATTACCGGTCCAAATGGTACAATGACTATG |
| | | CAGTGTCTGTAAAAAGCAGGATCACGATCAACCCTGATACGT |
| | | CTAAAAACCAGTTTTCTCTGCAACTTAATAGTGTGACCCCTGA |
| | | AGACACCGCTGTGTATTACTGTGCACGGGAGGTTACCGGTGA |
| | | TCTTGAAGATGCTTTTGATATATGGGGCCAAGGTACGATGGT |
| | | CACGGTGTCTAGTgggggaggcggcagcGACATACAGATGACGCAG |
| | | AGCCCATCCAGTCTCTCCGCGTCTGTTGGTGACAGAGTGACTA |
| | | TTACATGTAGGGCGTCTCAGACCATTTGGTCTTACCTCAATTG |
| | | GTATCAACAGCGACCAGGCAAAGCACCGAACTTGCTCATTTA |
| | | CGCTGCCAGCTCACTCCAAAGTGGTGTGCCGTCCAGATTTAGT |
| | | GGTAGGGGCAGTGGCACTGATTTCACTCTGACTATTTCAAGTC |
| | | TTCAAGCTGAGGATTTTGCCACATACTACTGCCAGCAAAGTT |
| | | ACTCAATACCTCAGACTTTTGGACAGGGGACAAAATTGGAGA |
| | | TTAAAtccggaACCACAACGCCCGCCCCGCGACCGCCTACTCCC |
| | | GCTCCCACAATTGCATCACAACCCCTGTCTTTGAGACCCGAA |
| | | GCTTGTCGACCAGCTGCCGGTGGCGCGGTTCACACGCGGGGG |
| | | CTCGATTTCGCCTGTGATATATATATATGGGCCCCATTGGCTG |
| | | GAACATGCGGAGTATTGCTTCTGAGCCTGGTGATTACCCTCTA |
| | | CTGTAAGAGAGGCCGGAAGAAACTTCTTTATATATTCAAGCA |
| | | GCCCTTTATGCGACCCGTTCAGACTACCCAAGAGGAAGATGG |
| | | ATGCAGTTGCCGCTTTCCAGAAGAGGAGGAGGGCGGGTGCGA |
| | | ACTGAGAGTGAAGTTCAGCAGATCCGCCGATGCTCCCGCCTA |
| | | TAAGCAGGGCCAAAACCAGCTGTACAACGAGCTGAACCTGG |
| | | GGAGAAGAGAAGAGTACGACGTGCTGGACAAGCGGAGAGGC |
| | | AGAGATCCTGAAATGGGCGGCAAGCCCAGACGGAAGAATCC |
| | | TCAAGAGGGCCTGTATAATGAGCTGCAGAAAGACAAGATGG |
| | | CCGAGGCCTACAGCGAGATCGGAATGAAGGGCGAGCGCAGA |
| | | AGAGGCAAGGGACACGATGGACTGTACCAGGGACTGAGCAC |
| | | CGCCACCAAGGATACCTATGACGCCCTGCACATGCAGGCCCT |
| | | GCCTCCAAGAtaa |
| 316 | CircCD19_22 | ATGCTGCTGCTGGTCACATCTCTGCTGCTGTGCGAGCTGCCCC |
| | Bispecific 29 | ATCCTGCCTTTCTGCTGATCCCCGACATCCAGATGACCCAGAC |
| | | CACAAGCAGCCTGTCTGCCAGCCTGGGCGATAGAGTGACCAT |
| | | CAGCTGTAGAGCCAGCCAGGACATCAGCAAGTACCTGAACTG |
| | | GTATCAGCAAAAGCCCGACGGCACCGTGAAGCTGCTGATCTA |
| | | CCACACCAGCAGACTGCACAGCGGCGTGCCAAGCAGATTTTC |
| | | TGGCAGCGGCTCTGGCACCGACTACAGCCTGACAATCAGCAA |
| | | CCTGGAACAAGAGGATATCGCTACCTACTTCTGCCAGCAAGG |
| | | CAACACCCTGCCTTACACCTTTGGCGGAGGCACCAAGCTGGA |
| | | AATCACCggcggcggaggatccCAGGTTCAACTCCAGCAGTCTGGTC |
| | | CCGGCCTCGTTAAACCAAGCCAGACTTTGTCTCTTACCTGTGC |
| | | TATCAGTGGCGATAGCGTGTCTAGTAATTCAGCCGCATGGAA |
| | | CTGGATCCGACAATCACCGAGTAGGGGACTTGAATGGCTGGG |
| | | TAGAACCTATTACCGGTCCAAATGGTACAATGACTATGCAGT |
| | | GTCTGTAAAAAGCAGGATCACGATCAACCCTGATACGTCTAA |
| | | AAACCAGTTTTCTCTGCAACTTAATAGTGTGACCCCTGAAGAC |
| | | ACCGCTGTGTATTACTGTGCACGGGAGGTTACCGGTGATCTTG |
| | | AAGATGCTTTTGATATATGGGGCCAAGGTACGATGGTCACGG |
| | | TGTCTAGTGGCTCTACAAGCGGCAGCGGCAAACCTGGATCTG |
| | | GCGAGGGATCTACCAAGGGCGACATACAGATGACGCAGAGC |
| | | CCATCCAGTCTCTCCGCGTCTGTTGGTGACAGAGTGACTATTA |
| | | CATGTAGGGCGTCTCAGACCATTTGGTCTTACCTCAATTGGTA |
| | | TCAACAGCGACCAGGCAAAGCACCGAACTTGCTCATTTACGC |
| | | TGCCAGCTCACTCCAAAGTGGTGTGCCGTCCAGATTTAGTGGT |
| | | AGGGGCAGTGGCACTGATTTCACTCTGACTATTTCAAGTCTTC |
| | | AAGCTGAGGATTTTGCCACATACTACTGCCAGCAAAGTTACT |
| | | CAATACCTCAGACTTTTGGACAGGGGACAAAATTGGAGATTA |
| | | AAgggggaggcggcagcGAAGTGAAACTGCAAGAGTCTGGCCCTGG |
| | | ACTGGTGGCCCCATCTCAGTCTCTGAGCGTGACCTGTACAGTC |
| | | AGCGGAGTGTCCCTGCCTGATTACGGCGTGTCCTGGATCAGA |
| | | CAGCCTCCTCGGAAAGGCCTGGAATGGCTGGGAGTGATCTGG |
| | | GGCAGCGAGACAACCTACTACAACAGCGCCCTGAAGTCCCGG |
| | | CTGACCATCATCAAGGACAACTCCAAGAGCCAGGTGTTCCTG |
| | | AAGATGAACAGCCTGCAGACCGACGACACCGCCATCTACTAT |
| | | TGCGCCAAGCACTACTACTACGGCGGCAGCTACGCCATGGAT |
| | | TATTGGGGCCAGGGCACCAGCGTGACCGTTTCTTCTtccggaACC |
| | | ACAACGCCCGCCCCGCGACCGCCTACTCCCGCTCCCACAATT |
| | | GCATCACAACCCCTGTCTTTGAGACCCGAAGCTTGTCGACCA |
| | | GCTGCCGGTGGCGCGGTTCACACGCGGGGGCTCGATTTCGCC |
| | | TGTGATATATATATATGGGCCCCATTGGCTGGAACATGCGGA |
| | | GTATTGCTTCTGAGCCTGGTGATTACCCTCTACTGTAAGAGAG |
| | | GCCGGAAGAAACTTCTTTATATATTCAAGCAGCCCTTTATGCG |
| | | ACCCGTTCAGACTACCCAAGAGGAAGATGGATGCAGTTGCCG |
| | | CTTTCCAGAAGAGGAGGAGGGGGGTGCGAACTGAGAGTGA |
| | | AGTTCAGCAGATCCGCCGATGCTCCCGCCTATAAGCAGGGCC |
| | | AAAACCAGCTGTACAACGAGCTGAACCTGGGGAGAAGAGAA |
| | | GAGTACGACGTGCTGGACAAGCGGAGAGGCAGAGATCCTGA |
| | | AATGGGCGGCAAGCCCAGACGGAAGAATCCTCAAGAGGGCC |
| | | TGTATAATGAGCTGCAGAAAGACAAGATGGCCGAGGCCTACA |
| | | GCGAGATCGGAATGAAGGGCGAGCGCAGAAGAGGCAAGGGA |
| | | CACGATGGACTGTACCAGGGACTGAGCACCGCCACCAAGGAT |
| | | ACCTATGACGCCCTGCACATGCAGGCCCTGCCTCCAAGAtaa |
| 317 | CircCD19_22 | ATGCTGCTGCTGGTCACATCTCTGCTGCTGTGCGAGCTGCCCC |
| | Bispecific 30 | ATCCTGCCTTTCTGCTGATCCCCCAGGTTCAACTCCAGCAGTC |
| | | TGGTCCCGGCCTCGTTAAACCAAGCCAGACTTTGTCTCTTACC |
| | | TGTGCTATCAGTGGCGATAGCGTGTCTAGTAATTCAGCCGCAT |
| | | GGAACTGGATCCGACAATCACCGAGTAGGGGACTTGAATGGC |
| | | TGGGTAGAACCTATTACCGGTCCAAATGGTACAATGACTATG |
| | | CAGTGTCTGTAAAAAGCAGGATCACGATCAACCCTGATACGT |
| | | CTAAAAACCAGTTTTCTCTGCAACTTAATAGTGTGACCCCTGA |
| | | AGACACCGCTGTGTATTACTGTGCACGGGAGGTTACCGGTGA |
| | | TCTTGAAGATGCTTTTGATATATGGGGCCAAGGTACGATGGT |
| | | CACGGTGTCTAGTgggggaggcggcagcGACATACAGATGACGCAG |
| | | AGCCCATCCAGTCTCTCCGCGTCTGTTGGTGACAGAGTGACTA |
| | | TTACATGTAGGGCGTCTCAGACCATTTGGTCTTACCTCAATTG |
| | | GTATCAACAGCGACCAGGCAAAGCACCGAACTTGCTCATTTA |
| | | CGCTGCCAGCTCACTCCAAAGTGGTGTGCCGTCCAGATTTAGT |
| | | GGTAGGGGCAGTGGCACTGATTTCACTCTGACTATTTCAAGTC |
| | | TTCAAGCTGAGGATTTTGCCACATACTACTGCCAGCAAAGTT |
| | | ACTCAATACCTCAGACTTTTGGACAGGGGACAAAATTGGAGA |
| | | TTAAAGGGGGAGGCGGATCCGGCGGTGGTGGCTCCGGCGGTG |
| | | GTGGTTCTGGAGGCGGCGGAAGCGGTGGGGGTGGTAGCGAC |
| | | ATCCAGATGACCCAGACCACAAGCAGCCTGTCTGCCAGCCTG |
| | | GGCGATAGAGTGACCATCAGCTGTAGAGCCAGCCAGGACATC |
| | | AGCAAGTACCTGAACTGGTATCAGCAAAAGCCCGACGGCACC |
| | | GTGAAGCTGCTGATCTACCACACCAGCAGACTGCACAGCGGC |
| | | GTGCCAAGCAGATTTTCTGGCAGCGGCTCTGGCACCGACTAC |
| | | AGCCTGACAATCAGCAACCTGGAACAAGAGGATATCGCTACC |
| | | TACTTCTGCCAGCAAGGCAACACCCTGCCTTACACCTTTGGCG |
| | | GAGGCACCAAGCTGGAAATCACCGGCTCTACAAGCGGCAGC |
| | | GGCAAACCTGGATCTGGCGAGGGATCTACCAAGGGCGAAGT |
| | | GAAACTGCAAGAGTCTGGCCCTGGACTGGTGGCCCCATCTCA |
| | | GTCTCTGAGCGTGACCTGTACAGTCAGCGGAGTGTCCCTGCCT |
| | | GATTACGGCGTGTCCTGGATCAGACAGCCTCCTCGGAAAGGC |
| | | CTGGAATGGCTGGGAGTGATCTGGGGCAGCGAGACAACCTAC |
| | | TACAACAGCGCCCTGAAGTCCCGGCTGACCATCATCAAGGAC |
| | | AACTCCAAGAGCCAGGTGTTCCTGAAGATGAACAGCCTGCAG |
| | | ACCGACGACACCGCCATCTACTATTGCGCCAAGCACTACTAC |
| | | TACGGCGGCAGCTACGCCATGGATTATTGGGGCCAGGGCACC |
| | | AGCGTGACCGTTTCTTCTtccggaACCACAACGCCCGCCCCGCGA |
| | | CCGCCTACTCCCGCTCCCACAATTGCATCACAACCCCTGTCTT |
| | | TGAGACCCGAAGCTTGTCGACCAGCTGCCGGTGGCGCGGTTC |
| | | ACACGCGGGGGCTCGATTTCGCCTGTGATATATATATATGGG |
| | | CCCCATTGGCTGGAACATGCGGAGTATTGCTTCTGAGCCTGGT |
| | | GATTACCCTCTACTGTAAGAGAGGCCGGAAGAAACTTCTTTA |
| | | TATATTCAAGCAGCCCTTTATGCGACCCGTTCAGACTACCCAA |
| | | GAGGAAGATGGATGCAGTTGCCGCTTTCCAGAAGAGGAGGA |
| | | GGGCGGGTGCGAACTGAGAGTGAAGTTCAGCAGATCCGCCG |
| | | ATGCTCCCGCCTATAAGCAGGGCCAAAACCAGCTGTACAACG |
| | | AGCTGAACCTGGGGAGAAGAGAAGAGTACGACGTGCTGGAC |
| | | AAGCGGAGAGGCAGAGATCCTGAAATGGGCGGCAAGCCCAG |
| | | ACGGAAGAATCCTCAAGAGGGCCTGTATAATGAGCTGCAGAA |
| | | AGACAAGATGGCCGAGGCCTACAGCGAGATCGGAATGAAGG |
| | | GCGAGCGCAGAAGAGGCAAGGGACACGATGGACTGTACCAG |
| | | GGACTGAGCACCGCCACCAAGGATACCTATGACGCCCTGCAC |
| | | ATGCAGGCCCTGCCTCCAAGAtaa |
| 318 | FMC63 CD28 | MLLLVTSLLLCELPHPAFLLIPDIQMTQTTSSLSASLGDRVTISCR |
| | anti-CD19 | ASQDISKYLNWYQQKPDGTVKLLIYHTSRLHSGVPSRFSGSGSG |
| | human CAR | TDYSLTISNLEQEDIATYFCQQGNTLPYTFGGGTKLEITGSTSGSG |
| | | KPGSGEGSTKGEVKLQESGPGLVAPSQSLSVTCTVSGVSLPDYG |
| | | VSWIRQPPRKGLEWLGVIWGSETTYYNSALKSRLTIIKDNSKSQV |
| | | FLKMNSLQTDDTAIYYCAKHYYYGGSYAMDYWGQGTSVTVSS |
| | | AAAIEVMYPPPYLDNEKSNGTIIHVKGKHLCPSPLFPGPSKPFWV |
| | | LVVVGGVLACYSLLVTVAFIIFWVRSKRSRLLHSDYMNMTPRRP |
| | | GPTRKHYQPYAPPRDFAAYRSRVKFSRSADAPAYQQGQNQLYN |
| | | ELNLGRREEYDVLDKRRGRDPEMGGKPRRKNPQEGLYNELQKD |
| | | KMAEAYSEIGMKGERRRGKGHDGLYQGLSTATKDTYDALHMQ |
| | | ALPPR |
| 319 | FMC63 4- | MALPVTALLLPLALLLHAARPDIQMTQTTSSLSASLGDRVTISCR |
| | 1BB anti- | ASQDISKYLNWYQQKPDGTVKLLIYHTSRLHSGVPSRFSGSGSG |
| | CD19 human | TDYSLTISNLEQEDIATYFCQQGNTLPYTFGGGTKLEITGGGGSG |
| | CAR | GGGSGGGGSEVKLQESGPGLVAPSQSLSVTCTVSGVSLPDYGVS |
| | | WIRQPPRKGLEWLGVIWGSETTYYNSALKSRLTIIKDNSKSQVFL |
| | | KMNSLQTDDTAIYYCAKHYYYGGSYAMDYWGQGTSVTVSSTT |
| | | TPAPRPPTPAPTIASQPLSLRPEACRPAAGGAVHTRGLDFACDIYI |
| | | WAPLAGTCGVLLLSLVITLYCKRGRKKLLYIFKQPFMRPVQTTQ |
| | | EEDGCSCRFPEEEEGGCELRVKFSRSADAPAYKQGQNQLYNELN |
| | | LGRREEYDVLDKRRGRDPEMGGKPRRKNPQEGLYNELQKDKM |
| | | AEAYSEIGMKGERRRGKGHDGLYQGLSTATKDTYDALHMQAL |
| | | PPR |
| 320 | Anti-BCMA | MALPVTALLLPLALLLHAARPDIVLTQSPASLAVSLGERATINCR |
| | human CAR | ASESVSVIGAHLIHWYQQKPGQPPKLLIYLASNLETGVPARFSGS |
| | | GSGTDFTLTISSLQAEDAAIYYCLQSRIFPRTFGQGTKLEIKGSTS |
| | | GSGKPGSGEGSTKGQVQLVQSGSELKKPGASVKVSCKASGYTFT |
| | | DYSINWVRQAPGQGLEWMGWINTETREPAYAYDFRGRFVFSLD |
| | | TSVSTAYLQISSLKAEDTAVYYCARDYSYAMDYWGQGTLVTVS |
| | | SAAATTTPAPRPPTPAPTIASQPLSLRPEACRPAAGGAVHTRGLD |
| | | FACDIYIWAPLAGTCGVLLLSLVITLYCKRGRKKLLYIFKQPFMR |
| | | PVQTTQEEDGCSCRFPEEEEGGCELRVKFSRSADAPAYQQGQNQ |
| | | LYNELNLGRREEYDVLDKRRGRDPEMGGKPRRKNPQEGLYNEL |
| | | QKDKMAEAYSEIGMKGERRRGKGHDGLYQGLSTATKDTYDAL |
| | | HMQALPPR |
| 321 | 1D3ζ mouse | MGVPTQLLGLLLLWITDAICDIQMTQSPASLSTSLGETVTIQCQA |
| | CD19 CAR; | SEDIYSGLAWYQQKPGKSPQLLIYGASDLQDGVPSRFSGSGSGT |
| | Caprine | QYSLKITSMQTEDEGVYFCQQGLTYPRTFGGGTKLELKGGGGSG |
| | Kobuvirus | GGGSGGGGSEVQLQQSGAELVRPGTSVKLSCKVSGDTITFYYM |
| | IRES | HFVKQRPGQGLEWIGRIDPEDESTKYSEKFKNKATLTADTSSNT |
| | | AYLKLSSLTSEDTATYFCIYGGYYFDYWGQGVMVTVSSIEFMYP |
| | | PPYLDNERSNGTIIHIKEKHLCHTQSSPKLFWALVVVAGVLFCYG |
| | | LLVTVALCVIWTNSRRNRGGQSDYMNMTPRRPGLTRKPYQPYA |
| | | PARDFAAYRPRAKFSRSAETAANLQDPNQLFNELNLGRREEFDV |
| | | LEKKRARDPEMGGKQQRRRNPQEGVYNALQKDKMAEAYSEIG |
| | | TKGERRRGKGHDGLFQGLSTATKDTFDALHMQTLAPR |
| 322 | WTζ (wild | MGVPTQLLGLLLLWITDAICDIQMTQSPASLSTSLGETVTIQCQA |
| | type zeta) | SEDIYSGLAWYQQKPGKSPQLLIYGASDLQDGVPSRFSGSGSGT |
| | mouse CAR | QYSLKITSMQTEDEGVYFCQQGLTYPRTFGGGTKLELKGGGGSG |
| | | GGGSGGGGSEVQLQQSGAELVRPGTSVKLSCKVSGDTITFYYM |
| | | HFVKQRPGQGLEWIGRIDPEDESTKYSEKFKNKATLTADTSSNT |
| | | AYLKLSSLTSEDTATYFCIYGGYYFDYWGQGVMVTVSSIEFMYP |
| | | PPYLDNERSNGTIIHIKEKHLCHTQSSPKLFWALVVVAGVLFCYG |
| | | LLVTVALCVIWTNSRRNRGGQSDYMNMTPRRPGLTRKPYQPYA |
| | | PARDFAAYRPRAKFSRSAETAANLQDPNQLYNELNLGRREEYD |
| | | VLEKKRARDPEMGGKQQRRRNPQEGVYNALQKDKMAEAYSEI |
| | | GTKGERRRGKGHDGLYQGLSTATKDTYDALHMQTLAPR |

[1252] In some embodiments, a CAR is encoded by a nucleotide sequence as listed in Table 24.

TABLE 25
CAR domain sequences.

| SEQ | | |
|---|---|---|
| ID NO | Protein | Sequence |
| 318 | 4-1BB | KRGRKKLLYIFKQPFMRPVQTTQEEDGCSCRFPEEEEGGCEL |
| 319 | CD3ζ | RVKFSRSADAPAYKQGQNQLYNELNLGRREEYDVLDKRRGRDPE |
| | intracellular | MGGKPRRKNPQEGLYNELQKDKMAEAYSEIGMKGERRRGKGHD |
| | domain | GLYQGLSTATKDTYDALHMQALPPR |
| 320 | CD28 | QVQLVQSGAEVEKPGASVKVSCKASGYTFTDYYMHWVRQAPGQ |
| | intracellular | GLEWMGWINPNSGGTNYAQKFQGRVTMTRDTSISTAYMELSRLR |
| | signaling | SDDTAVYYCASGWDFDYWGQGTLVTVSSGGGGSGGGGSGGGGS |
| | domain | GGGGSDIVMTQSPSSLSASVGDRVTITCRASQSIRYYLSWYQQKP |
| | | GKAPKLLIYTASILQNGVPSRFSGSGSGTDFTLTISSLQPEDFATYY |
| | | CLQTYTTPDFGPGTKVEIK |
| 321 | FMC63 VH | EVKLQESGPGLVAPSQSLSVTCTVSGVSLPDYGVSWIRQPPRKGLE |
| | | WLGVIWGSETTYYNSALKSRLTIIKDNSKSQVFLKMNSLQTDDTA |
| | | IYYCAKHYYYGGSYAMDYWGQGTSVTVSS |
| 322 | FMC63 VL | DIQMTQTTSSLSASLGDRVTISCRASQDISKYLNWYQQKPDGTVK |
| | | LLIYHTSRLHSGVPSRFSGSGSGTDYSLTISNLEQEDIATYFCQQGN |
| | | TLPYTFGGGTKLEIT |

[1253] In some embodiments, a CAR domain encoded by an inventive polynucleotide has a sequence as listed in Table 25.

TABLE 26
PD-1 or PD-L1 sequences.

| SEQ | | |
|---|---|---|
| ID NO | Description | Sequence |
| 323 | Pembrolizumab heavy | QVQLVQSGVEVKKPGASVKVSCKASGYTFTNYYMYWV |
| | chain | RQAPGQGLEWMGGINPSNGGTNFNEKFKNRVTLTTDSST |
| | | TTAYMELKSLQFDDTAVYYCARRDYRFDMGFDYWGQG |
| | | TTVTVSSASTKGPSVFPLAPCSRSTSESTAALGCLVKDYFP |
| | | EPVTVSWNSGALTSGVHTFPAVLQSSGLYSLSSVVTVPSS |
| | | SLGTKTYTCNVDHKPSNTKVDKRVESKYGPPCPPCPAPE |
| | | FLGGPSVFLFPPKPKDTLMISRTPEVTCVVVDVSQEDPEV |
| | | QFNWYVDGVEVHNAKTKPREEQFNSTYRVVSVLTVLHQ |
| | | DWLNGKEYKCKVSNKGLPSSIEKTISKAKGQPREPQVYT |
| | | LPPSQEEMTKNQVSLTCLVKGFYPSDIAVEWESNGQPEN |
| | | NYKTTPPVLDSDGSFFLYSRLTVDKSRWQEGNVFSCSVM |
| | | HEALHNHYTQKSLSLSLGK |
| 324 | Pembrolizumab light | EIVLTQSPATLSLSPGERATLSCRASKGVSTSGYSYLHWY |
| | chain | QQKPGQAPRLLIYLASYLESGVPARFSGSGSGTDFTLTISS |
| | | LEPEDFAVYYCQHSRDLPLTFGGGTKVEIKRTVAAPSVFI |
| | | FPPSDEQLKSGTASVVCLLNNFYPREAKVQWKVDNALQS |
| | | GNSQESVTEQDSKDSTYSLSSTLTLSKADYEKHKVYACE |
| | | VTHQGLSSPVTKSFNRGEC |
| 325 | Nivolumab heavy | QVQLVESGGGVVQPGRSLRLDCKASGITFSNSGMHWVR |
| | chain | QAPGKGLEWVAVIWYDGSKRYYADSVKGRFTISRDNSK |
| | | NTLFLQMNSLRAEDTAVYYCATNDDYWGQGTLVTVSSA |
| | | STKGPSVFPLAPCSRSTSESTAALGCLVKDYFPEPVTVSW |
| | | NSGALTSGVHTFPAVLQSSGLYSLSSVVTVPSSSLGTKTY |
| | | TCNVDHKPSNTKVDKRVESKYGPPCPPCPAPEFLGGPSVF |
| | | LFPPKPKDTLMISRTPEVTCVVVDVSQEDPEVQFNWYVD |
| | | GVEVHNAKTKPREEQFNSTYRVVSVLTVLHQDWLNGKE |
| | | YKCKVSNKGLPSSIEKTISKAKGQPREPQVYTLPPSQEEM |
| | | TKNQVSLTCLVKGFYPSDIAVEWESNGQPENNYKTTPPV |
| | | LDSDGSFFLYSRLTVDKSRWQEGNVFSCSVMHEALHNH |
| | | YTQKSLSLSLGK |
| 326 | Nivolumab light | EIVLTQSPATLSLSPGERATLSCRASQSVSSYLAWYQQKP |
| | chain | GQAPRLLIYDASNRATGIPARFSGSGSGTDFTLTISSLEPE |
| | | DFAVYYCQQSSNWPRTFGQGTKVEIKRTVAAPSVFIFPPS |
| | | DEQLKSGTASVVCLLNNFYPREAKVQWKVDNALQSGNS |
| | | QESVTEQDSKDSTYSLSSTLTLSKADYEKHKVYACEVTH |
| | | QGLSSPVTKSFNRGEC |
| 327 | Atezolizumab heavy | EVQLVESGGGLVQPGGSLRLSCAASGFTFSDSWIHWVRQ |
| | chain | APGKGLEWVAWISPYGGSTYYADSVKGRFTISADTSKNT |
| | | AYLQMNSLRAEDTAVYYCARRHWPGGFDYWGQGTLVT |
| | | VSSASTKGPSVFPLAPSSKSTSGGTAALGCLVKDYFPEPV |
| | | TVSWNSGALTSGVHTFPAVLQSSGLYSLSSVVTVPSSSLG |
| | | TQTYICNVNHKPSNTKVDKKVEPKSCDKTHTCPPCPAPE |
| | | LLGGPSVFLFPPKPKDTLMISRTPEVTCVVVDVSHEDPEV |
| | | KFNWYVDGVEVHNAKTKPREEQYASTYRVVSVLTVLHQ |
| | | DWLNGKEYKCKVSNKALPAPIEKTISKAKGQPREPQVYT |
| | | LPPSREEMTKNQVSLTCLVKGFYPSDIAVEWESNGQPEN |
| | | NYKTTPPVLDSDGSFFLYSKLTVDKSRWQQGNVFSCSVM |
| | | HEALHNHYTQKSLSLSPGK |
| 328 | Atezolizumab light | DIQMTQSPSSLSASVGDRVTITCRASQDVSTAVAWYQQK |
| | chain | PGKAPKLLIYSASFLYSGVPSRFSGSGSGTDFTLTISSLQPE |
| | | DFATYYCQQYLYHPATFGQGTKVEIKRTVAAPSVFIFPPS |
| | | DEQLKSGTASVVCLLNNFYPREAKVQWKVDNALQSGNS |
| | | QESVTEQDSKDSTYSLSSTLTLSKADYEKHKVYACEVTH |
| | | QGLSSPVTKSFNRGEC |
| 329 | Avelumab heavy | EVQLLESGGGLVQPGGSLRLSCAASGFTFSSYIMMWVRQ |
| | chain | APGKGLEWVSSIYPSGGITFYADTVKGRFTISRDNSKNTL |
| | | YLQMNSLRAEDTAVYYCARIKLGTVTTVDYWGQGTLVT |
| | | VSSASTKGPSVFPLAPSSKSTSGGTAALGCLVKDYFPEPV |
| | | TVSWNSGALTSGVHTFPAVLQSSGLYSLSSVVTVPSSSLG |
| | | TQTYICNVNHKPSNTKVDKKVEPKSCDKTHTCPPCPAPE |
| | | LLGGPSVFLFPPKPKDTLMISRTPEVTCVVVDVSHEDPEV |
| | | KFNWYVDGVEVHNAKTKPREEQYNSTYRVVSVLTVLHQ |
| | | DWLNGKEYKCKVSNKALPAPIEKTISKAKGQPREPQVYT |
| | | LPPSRDELTKNQVSLTCLVKGFYPSDIAVEWESNGQPENN |
| | | YKTTPPVLDSDGSFFLYSKLTVDKSRWQQGNVFSCSVMH |
| | | EALHNHYTQKSLSLSPGK |
| 330 | Avelumab light chain | QSALTQPASVSGSPGQSITISCTGTSSDVGGYNYVSWYQQ |
| | | HPGKAPKLMIYDVSNRPSGVSNRFSGSKSGNTASLTISGL |
| | | QAEDEADYYCSSYTSSSTRVFGTGTKVTVLGQPKANPTV |
| | | TLFPPSSEELQANKATLVCLISDFYPGAVTVAWKADGSPV |
| | | KAGVETTKPSKQSNNKYAASSYLSLTPEQWKSHRSYSCQ |
| | | VTHEGSTVEKTVAPTECS |
| 331 | Durvalumab heavy | EVQLVESGGGLVQPGGSLRLSCAASGFTFSRYWMSWVR |
| | chain | QAPGKGLEWVANIKQDGSEKYYVDSVKGRFTISRDNAK |
| | | NSLYLQMNSLRAEDTAVYYCAREGGWFGELAFDYWGQ |
| | | GTLVTVSSASTKGPSVFPLAPSSKSTSGGTAALGCLVKDY |
| | | FPEPVTVSWNSGALTSGVHTFPAVLQSSGLYSLSSVVTVP |
| | | SSSLGTQTYICNVNHKPSNTKVDKRVEPKSCDKTHTCPPC |
| | | PAPEFEGGPSVFLFPPKPKDTLMISRTPEVTCVVVDVSHE |
| | | DPEVKFNWYVDGVEVHNAKTKPREEQYNSTYRVVSVLT |
| | | VLHQDWLNGKEYKCKVSNKALPASIEKTISKAKGQPREP |
| | | QVYTLPPSREEMTKNQVSLTCLVKGFYPSDIAVEWESNG |
| | | QPENNYKTTPPVLDSDGSFFLYSKLTVDKSRWQQGNVFS |
| | | CSVMHEALHNHYTQKSLSLSPGK |
| 332 | Durvalumab light | EIVLTQSPGTLSLSPGERATLSCRASQRVSSSYLAWYQQK |
| | chain | PGQAPRLLIYDASSRATGIPDRFSGSGSGTDFTLTISRLEPE |
| | | DFAVYYCQQYGSLPWTFGQGTKVEIKRTVAAPSVFIFPPS |
| | | DEQLKSGTASVVCLLNNFYPREAKVQWKVDNALQSGNS |
| | | QESVTEQDSKDSTYSLSSTLTLSKADYEKHKVYACEVTH |
| | | QGLSSPVTKSFNRGEC |

[1254] In some embodiments, a cleavage site separating expression sequences encoded by an inventive polynucleotide has a sequence listed in Table 26.

TABLE 27
Cytokine sequences.

| SEQ | | |
|---|---|---|
| ID NO | Cytokine | Sequence |
| 333 | IL-2 | APTSSSTKKTQLQLEHLLLDLQMILNGINNYKNPKLTRMLTFKFY |
| | | MPKKATELKHLQCLEEELKPLEEVLNLAQSKNFHLRPRDLISNINV |
| | | IVLELKGSETTFMCEYADETATIVEFLNRWITFCQSIISTLT |
| 334 | IL-12A | RNLPVATPDPGMFPCLHHSQNLLRAVSNMLQKARQTLEFYPCTSE |
| | | EIDHEDITKDKTSTVEACLPLELTKNESCLNSRETSFITNGSCLASR |
| | | KTSFMMALCLSSIYEDLKMYQVEFKTMNAKLLMDPKRQIFLDQN |
| | | MLAVIDELMQALNFNSETVPQKSSLEEPDFYKTKIKLCILLHAFRIR |
| | | AVTIDRVMSYLNAS |
| 335 | IL-12B | IWELKKDVYVVELDWYPDAPGEMVVLTCDTPEEDGITWTLDQSS |
| | | EVLGSGKTLTIQVKEFGDAGQYTCHKGGEVLSHSLLLLHKKEDGI |
| | | WSTDILKDQKEPKNKTFLRCEAKNYSGRFTCWWLTTISTDLTFSV |
| | | KSSRGSSDPQGVTCGAATLSAERVRGDNKEYEYSVECQEDSACPA |
| | | AEESLPIEVMVDAVHKLKYENYTSSFFIRDIIKPDPPKNLQLKPLKN |
| | | SRQVEVSWEYPDTWSTPHSYFSLTFCVQVQGKSKREKKDRVFTD |
| | | KTSATVICRKNASISVRAQDRYYSSSWSEWASVPCS |
| 336 | IL-7 | DCDIEGKDGKQYESVLMVSIDQLLDSMKEIGSNCLNNEFNFFKRHI |
| | | CDANKEGMFLFRAARKLRQFLKMNSTGDFDLHLLKVSEGTTILLN |
| | | CTGQVKGRKPAALGEAQPTKSLEENKSLKEQKKLNDLCFLKRLL |
| | | QEIKTCWNKILMGTKEH |
| 337 | IL-10 | SPGQGTQSENSCTHFPGNLPNMLRDLRDAFSRVKTFFQMKDQLD |
| | | NLLLKESLLEDFKGYLGCQALSEMIQFYLEEVMPQAENQDPDIKA |
| | | HVNSLGENLKTLRLRLRRCHRFLPCENKSKAVEQVKNAFNKLQE |
| | | KGIYKAMSEFDIFINYIEAYMTMKIRN |
| 338 | IL-15 | NWVNVISDLKKIEDLIQSMHIDATLYTESDVHPSCKVTAMKCFLL |
| | | ELQVISLESGDASIHDTVENLIILANNSLSSNGNVTESGCKECEELE |
| | | EKNIKEFLQSFVHIVQMFINTS |
| 339 | IL-18 | YFGKLESKLSVIRNLNDQVLFIDQGNRPLFEDMTDSDCRDNAPRTI |
| | | FIISMYKDSQPRGMAVTISVKCEKISTLSCENKIISFKEMNPPDNIKD |
| | | TKSDIIFFQRSVPGHDNKMQFESSSYEGYFLACEKERDLFKLILKK |
| | | EDELGDRSIMFTVQNED |
| 340 | IL-27beta | RKGPPAALTLPRVQCRASRYPIAVDCSWTLPPAPNSTSPVSFIATY |
| | | RLGMAARGHSWPCLQQTPTSTSCTITDVQLFSMAPYVLNVTAVH |
| | | PWGSSSSFVPFITEHIIKPDPPEGVRLSPLAERQLQVQWEPPGSWPF |
| | | PEIFSLKYWIRYKRQGAARFHRVGPIEATSFILRAVRPRARYYVQV |
| | | AAQDLTDYGELSDWSLPATATMSLGK |
| 341 | IFNgamma | QDPYVKEAENLKKYFNAGHSDVADNGTLFLGILKNWKEESDRKI |
| | | MQSQIVSFYFKLFKNFKDDQSIQKSVETIKEDMNVKFFNSNKKKR |
| | | DDFEKLTNYSVTDLNVQRKAIHELIQVMAELSPAAKTGKRKRSQ |
| | | MLFRG |
| 342 | TGFbetal | ALDTNYCFSSTEKNCCVRQLYIDFRKDLGWKWIHEPKGYHANFC |
| | | LGPCPYIWSLDTQYSKVLALYNQHNPGASAAPCCVPQALEPLPIV |
| | | YYVGRKPKVEQLSNMIVRSCKCS |

[1255] In some embodiments, a cytokine encoded by an inventive polynucleotide has a sequence as listed in Table 27.

TABLE 28
Transcription factor sequences.

| SEQ | Transcription | |
|---|---|---|
| ID NO | factor | Sequence |
| 343 | FOXP3 | MPNPRPGKPSAPSLALGPSPGASPSWRAAPKASDLLGARGPGGT |
| | | FQGRDLRGGAHASSSSLNPMPPSQLQLPTLPLVMVAPSGARLGP |
| | | LPHLQALLQDRPHFMHQLSTVDAHARTPVLQVHPLESPAMISLT |
| | | PPTTATGVFSLKARPGLPPGINVASLEWVSREPALLCTFPNPSAPR |
| | | KDSTLSAVPQSSYPLLANGVCKWPGCEKVFEEPEDFLKHCQADH |
| | | LLDEKGRAQCLLQREMVQSLEQQLVLEKEKLSAMQAHLAGKM |
| | | ALTKASSVASSDKGSCCIVAAGSQGPVVPAWSGPREAPDSLFAV |
| | | RRHLWGSHGNSTFPEFLHNMDYFKFHNMRPPFTYATLIRWAILE |
| | | APEKQRTLNEIYHWFTRMFAFFRNHPATWKNAIRHNLSLHKCFV |
| | | RVESEKGAVWTVDELEFRKKRSQRPSRCSNPTPGP |
| 344 | FOXP3 | MPNPRPGKPSAPSLALGPSPGASPSWRAAPKASDLLGARGPGGT |
| | | FQGRDLRGGAHASSSSLNPMPPSQLQLPTLPLVMVAPSGARLGP |
| | | LPHLQALLQDRPHFMHQLSTVDAHARTPVLQVHPLESPAMISLT |
| | | PPTTATGVFSLKARPGLPPGINVASLEWVSREPALLCTFPNPSAPR |
| | | KDSTLSAVPQSSYPLLANGVCKWPGCEKVFEEPEDFLKHCQADH |
| | | LLDEKGRAQCLLQREMVQSLEQQLVLEKEKLSAMQAHLAGKM |
| | | ALTKASSVASSDKGSCCIVAAGSQGPVVPAWSGPREAPDSLFAV |
| | | RRHLWGSHGNSTFPEFLHNMDYFKFHNMRPPFTYATLIRWAILE |
| | | APEKQRTLNEIYHWFTRMFAFFRNHPATWKNAIRHNLSLHKCFV |
| | | RVESEKGAVWTVDELEFRKKR |
| 345 | FOXP3 | GGAHASSSSLNPMPPSQLQLPTLPLVMVAPSGARLGPLPHLQAL |
| | | LQDRPHFMHQLSTVDAHARTPVLQVHPLESPAMISLTPPTTATG |
| | | VFSLKARPGLPPGINVASLEWVSREPALLCTFPNPSAPRKDSTLS |
| | | AVPQSSYPLLANGVCKWPGCEKVFEEPEDFLKHCQADHLLDEK |
| | | GRAQCLLQREMVQSLEQQLVLEKEKLSAMQAHLAGKMALTKA |
| | | SSVASSDKGSCCIVAAGSQGPVVPAWSGPREAPDSLFAVRRHLW |
| | | GSHGNSTFPEFLHNMDYFKFHNMRPPFTYATLIRWAILEAPEKQ |
| | | RTLNEIYHWFTRMFAFFRNHPATWKNAIRHNLSLHKCFVRVESE |
| | | KGAVWTVDELEFRKKR |
| 346 | STAT5B | MAVWIQAQQLQGEALHQMQALYGQHFPIEVRHYLSQWIESQA |
| | | WDSVDLDNPQENIKATQLLEGLVQELQKKAEHQVGEDGFLLKI |
| | | KLGHYATQLQNTYDRCPMELVRCIRHILYNEQRLVREANNGSSP |
| | | AGSLADAMSQKHLQINQTFEELRLVTQDTENELKKLQQTQEYFII |
| | | QYQESLRIQAQFGPLAQLSPQERLSRETALQQKQVSLEAWLQRE |
| | | AQTLQQYRVELAEKHQKTLQLLRKQQTIILDDELIQWKRRQQLA |
| | | GNGGPPEGSLDVLQSWCEKLAEIIWQNRQQIRRAEHLCQQLPIPG |
| | | PVEEMLAEVNATITDIISALVTSTFIIEKQPPQVLKTQTKFAATVR |
| | | LLVGGKLNVHMNPPQVKATIISEQQAKSLLKNENTRNDYSGEIL |
| | | NNCCVMEYHQATGTLSAHFRNMSLKRIKRSDRRGAESVTEEKF |
| | | TILFESQFSVGGNELVFQVKTLSLPVVVIVHGSQDNNATATVLW |
| | | DNAFAEPGRVPFAVPDKVLWPQLCEALNMKFKAEVQSNRGLTK |
| | | ENLVFLAQKLFNNSSSHLEDYSGLSVSWSQFNRENLPGRNYTFW |
| | | QWFDGVMEVLKKHLKPHWNDGAILGFVNKQQAHDLLINKPDG |
| | | TFLLRFSDSEIGGITIAWKFDSQERMFWNLMPFTTRDFSIRSLADR |
| | | LGDLNYLIYVFPDRPKDEVYSKYYTPVPCESATAKAVDGYVKPQ |
| | | IKQVVPEFVNASADAGGGSATYMDQAPSPAVCPQAHYNMYPQ |
| | | NPDSVLDTDGDFDLEDTMDVARRVEELLGRPMDSQWIPHAQS |
| 347 | HELIOS | METEAIDGYITCDNELSPEREHSNMAIDLTSSTPNGQHASPSHMT |
| | | STNSVKLEMQSDEECDRKPLSREDEIRGHDEGSSLEEPLIESSEVA |
| | | DNRKVQELQGEGGIRLPNGKLKCDVCGMVCIGPNVLMVHKRSH |
| | | TGERPFHCNQCGASFTQKGNLLRHIKLHSGEKPFKCPFCSYACRR |
| | | RDALTGHLRTHSVGKPHKCNYCGRSYKQRSSLEEHKERCHNYL |
| | | QNVSMEAAGQVMSHHVPPMEDCKEQEPIMDNNISLVPFERPAVI |
| | | EKLTGNMGKRKSSTPQKFVGEKLMRFSYPDIHFDMNLTYEKEA |
| | | ELMQSHMMDQAINNAITYLGAEALHPLMQHPPSTIAEVAPVISS |
| | | AYSQVYHPNRIERPISRETADSHENNMDGPISLIRPKSRPQEREAS |
| | | PSNSCLDSTDSESSHDDHQSYQGHPALNPKRKQSPAYMKEDVK |
| | | ALDTTKAPKGSLKDIYKVFNGEGEQIRAFKCEHCRVLFLDHVMY |
| | | TIHMGCHGYRDPLECNICGYRSQDRYEFSSHIVRGEHTFH |

[1256] In some embodiments, a transcription factor encoded by an inventive polynucleotide has a sequence as listed in Table 28.

TABLE 29
Additional Accessory Sequences

| SEQ | | |
|---|---|---|
| ID NO | IRES | Sequence |
| 390 | CK 3′ UTR Scr | ccctgcagccgtcaccgtaagtttgaagttaccgcatatcagcctctgcttcccagcgcgtccaatt |
| | | cctgttcttattgtttcccctccaggcgttacgcgtgacgacgaactgtgtcgcagctaccacattatt |
| | | ccggagccttcattctcgcggctctgatcgt |
| 391 | CK 3′ UTR S2M | ggagaccgcggccacgccgagtaggatcgagggtacagtctcc |
| 392 | CK 3′ UTR | gacaccaggatcactcttgctctgacccgccctgtgtagaatagactcatgcttccctaagacctgg |
| | | atttcttcccaggcactttcacccgcctgccctgctccttcagtggactgcacccagggaggcggtc |
| | | tctgactgtcctttactttctattctggattgc |
| 393 | CK 5′ UTR 1 | AAACCCCCCTAAGCCGCCGCCGCCGCCACC |
| 394 | CK 5′ UTR 2 | CCCCCCCAACCCGTCACG |
| 395 | CK 5′ UTR 3 | GTCACG |
| 396 | SZ1 3′ UTR Scr | tctgcgcactcgtaatcagtactaacccccctttgtcggacactatgcgataatcgatccgcctttttc |
| | | accgccttcggaattttatttacctcaactgatcctggagtctctcttggttttcacggaggcctccgcc |
| | | ca |
| 397 | SZ1 S2M | ggagaccgcggccacgccgagtaggatcgagggtacagtctcc |
| 398 | SZ1 3′ UTR | ccccttgaaacccccgccccaggttcagtctctcttcatccctctgtcctgcatggtgatacaaagac |
| | | cctttgtggaccctaagccatgtagttgctgctccctccttccagttgtgaatattggtttctgttaatca |
| | | ca |
| 399 | SZ1 5′ UTR 1 | AAACCCCCCTAAGCCGCCGCCGCCGCCACC |
| 400 | SZ1 5′ UTR 2 | CCCCCCCAACCCGTCACG |
| 401 | SZ1 5′ UTR 3 | GTCACG |
| 402 | UTR1 | gTcacG |
| 403 | UTR2 | AATAAGAGAGAAAAGAAGAGTAAGAAGAAATATAAGAGC |
| | | CACC |
| 404 | UTR3 | cgaactagtattcttctggtccccacagactcagagagaacccgccacc |
| 405 | UTR4 | Agccacc |
| 406 | STOP1 | tgatAGctAaCtaG |
| 407 | STOP2 | tagtAGctAaCtaG |
| 408 | STOP3 | tGatGActGaGtGA |
| 409 | STOP4 | tagtagctagGtag |
| 410 | STOP5 | taa |
| 411 | STOP6 | taatagCtaaCtag |
| 412 | STOP7 | taaCtagCtaaCtag |
| 718 | CCL1 | MQIITTALVCLLLAGMWPEDVDSKSMQVPFSRCCFSFAEQEIP |
| | | LRAILCYRNTSSICSNEGLIFKLKRGKEACALDTVGWVQRHRK |
| | | MLRHCPSKRK |
| 719 | CCL2 | MKVSAALLCLLLIAATFIPQGLAQPDAINAPVTCCYNFTNRKIS |
| | | VQRLAS |
| 720 | CCL3 | MQVSTAALAVLLCTMALCNQFSASLAADTPTACCFSYTSRQI |
| | | PQNFIADYFETSSQCSKPGVIFLTKRSRQVCADPSEEWVQKYV |
| | | SDLELSA |
| 721 | CCL4 | MKLCVTVLSLLMLVAAFCSPALSAPMGSDPPTACCFSYTARK |
| | | LPRNFVVDYYETSSLCSQPAVVFQTKRSKQVCADPSESWVQE |
| | | YVYDLELN |
| 722 | CCL5 | MKVSAAALAVILIATALCAPASASPYSSDTTPCCFAYIARPLPR |
| | | AHIKEYFYTSGKCSNPAVVFVTRKNRQVCANPEKKWVREYIN |
| | | SLEMS |
| 723 | CCL6 | MRNSKTAISFFILVAVLGSQAGLIQEMEKEDRRYNPPIIHQGFQ |
| | | DTSSDCCFSYATQIPCKRFIYYFPTSGGCIKPGIIFISRRGTQVCA |
| | | DPSDRRVQRCLSTLKQGPRSGNKVIA |
| 724 | CCL7 | MKASAALLCLLLTAAAFSPQGLAQPVGINTSTTCCYRFINKKI |
| | | PKQRLESYRRTTSSHCPREAVIFKTKLDKEICADPTQKWVQDF |
| | | MKHLDKKTQTPKL |
| 725 | CCL8 | MKVSAALLCLLLMAATFSPQGLAQPDSVSIPITCCFNVINRKIP |
| | | IQRLESYTRITNIQCPKEAVIFKTKRGKEVCADPKERWVRDSM |
| | | KHLDQIFQNLKP |
| 726 | CCL9/CCL10 | MKPFHTALSFLILTTALGIWAQITHATETKEVQSSLKAQQGLEI |
| | | EMFHMGFQDSSDCCLSYNSRIQCSRFIGYFPTSGGCTRPGIIFIS |
| | | KRGFQVCANPSDRRVQRCIERLEQNSQPRTYKQ |
| 727 | CCL11 | MKVSAALLWLLLIAAAFSPQGLAGPASVPTTCCFNLANRKIPL |
| | | QRLESYRRITSGKCPQKAVIFKTKLAKDICADPKKKWVQDSM |
| | | KYLDQKSPTPKP |
| 728 | CCL12 | MKISTLLCLLLIATTISPQVLAGPDAVSTPVTCCYNVVKQKIHV |
| | | RKLKSYRRITSSQCPREAVIFRTILDKEICADPKEKWVKNSINH |
| | | LDKTSQTFILEPSCLG |
| 729 | CCL13 | MKVSAVLLCLLLMTAAFNPQGLAQPDALNVPSTCCFTFSSKKI |
| | | SLQRLKSYVITTSRCPQKAVIFRTKLGKEICADPKEKWVQNY |
| | | MKHLGRKAHTLKT |
| 730 | CCL14 | MKISVAAIPFFLLITIALGTKTESSSRGPYHPSECCFTYTTYKIPR |
| | | QRIMDYYETNSQCSKPGIVFITKRGHSVCTNPSDKWVQDYIKD |
| | | MKEN |
| 731 | CCL15 | MKVSVAALSCLMLVAVLGSQAQFINDAETELMMSKLPLENP |
| | | VVLNSFHFAADCCTSYISQSIPCSLMKSYFETSSECSKPGVIFLT |
| | | KKGRQVCAKPSGPGVQDCMKKLKPYSI |
| 732 | CCL16 | MKVSEAALSLLVLILIITSASRSQPKVPEWVNTPSTCCLKYYEK |
| | | VLPRRLVVGYRKALNCHLPAIIFVTKRNREVCTNPNDDWVQE |
| | | YIKDPNLPLLPTRNLSTVKIITAKNGQPQLLNSQ |
| 733 | CCL17 | MAPLKMLALVTLLLGASLQHIHAARGTNVGRECCLEYFKGAI |
| | | PLRKLKTWYQTSEDCSRDAIVFVTVQGRAICSDPNNKRVKNA |
| | | VKYLQSLERS |
| 734 | CCL18 | MKGLAAALLVLVCTMALCSCAQVGTNKELCCLVYTSWQIPQ |
| | | KFIVDYSETSPQCPKPGVILLTKRGRQICADPNKKWVQKYISD |
| | | LKLNA |
| 735 | CCL19 | MALLLALSLLVLWTSPAPTLSGTNDAEDCCLSVTQKPIPGYIV |
| | | RNFHYLLIKDGCRVPAVVFTTLRGRQLCAPPDQPWVERIIQRL |
| | | QRTSAKMKRRSS |
| 736 | CCL20 | MCCTKSLLLAALMSVLLLHLCGESEAASNFDCCLGYTDRILH |
| | | PKFIVGFTRQLANEGCDINAIIFHTKKKLSVCANPKQTWVKYI |
| | | VRLLSKKVKNM |
| 737 | CCL21 | MAQSLALSLLILVLAFGIPRTQGSDGGAQDCCLKYSQRKIPAK |
| | | VVRSYRKQEPSLGCSIPAILFLPRKRSQAELCADPKELWVQQL |
| | | MQHLDKTPSPQKPAQGCRKDRGASKTGKKGKGSKGCKRTER |
| | | SQTPKGP |
| 738 | CCL22 | MDRLQTALLVVLVLLAVALQATEAGPYGANMEDSVCCRDY |
| | | VRYRLPLRVVKHFYWTSDSCPRPGVVLLTFRDKEICADPRVP |
| | | WVKMILNKLSQ |
| 739 | CCL23 | MKVSVAALSCLMLVTALGSQARVTKDAETEFMMSKLPLENP |
| | | VLLDRFHATSADCCISYTPRSIPCSLLESYFETNSECSKPGVIFL |
| | | TKKGRRFCANPSDKQVQVCVRMLKLDTRIKTRKN |
| 740 | CCL24 | MAGLMTIVTSLLFLGVCAHHIIPTGSVVIPSPCCMFFVSKRIPE |
| | | NRVVSYQLSSRSTCLKAGVIFTTKKGQQFCGDPKQEWVQRY |
| | | MKNLDAKQKKASPRARAVAVKGPVQRYPGNQTTC |
| 741 | CCL25 | MNLWLLACLVAGFLGAWAPAVHTQGVFEDCCLAYHYPIGW |
| | | AVLRRAWTYRIQEVSGSCNLPAAIFYLPKRHRKVCGNPKSRE |
| | | VQRAMKLLDARNKVFAKLHHNTQTFQAGPHAVKKLSSGNSK |
| | | LSSSKFSNPISSSKRNVSLLISANSGL |
| 742 | CCL26 | MMGLSLASAVLLASLLSLHLGTATRGSDISKTCCFQYSHKPLP |
| | | WTWVRSYEFTSNSCSQRAVIFTTKRGKKVCTHPRKKWVQKYI |
| | | SLLKTPKQL |
| 743 | CCL27 | MKGPPTFCSLLLLSLLLSPDPTAAFLLPPSTACCTQLYRKPLSD |
| | | KLLRKVIQVELQEADGDCHLQAFVLHLAQRSICIHPQNPSLSQ |
| | | WFEHQERKLHGTLPKLNFGMLRKMG |
| 744 | CCL28 | MQQRGLAIVALAVCAALHASEAILPIASSCCTEVSHHISRRLLE |
| | | RVNMCRIQRADGDCDLAAVILHVKRRRICVSPHNHTVKQWM |
| | | KVQAAKKNGKGNVCHRKKHHGKRNSNRAHQGKHETYGHK |
| | | TPY |
| 745 | CXCL1 | MARAALSAAPSNPRLLRVALLLLLLVAAGRRAAGASVATELR |
| | | CQCLQTLQGIHPKNIQSVNVKSPGPHCAQTEVIATLKNGRKAC |
| | | LNPASPIVKKIIEKMLNSDKSN |
| 746 | CXCL2 | MARATLSAAPSNPRLLRVALLLLLLVAASRRAAGAPLATELR |
| | | CQCLQTLQGIHLKNIQSVKVKSPGPHCAQTEVIATLKNGQKA |
| | | CLNPASPMVKKIIEKMLKNGKSN |
| 747 | CXCL3 | MAHATLSAAPSNPRLLRVALLLLLLVAASRRAAGASVVTELR |
| | | CQCLQTLQGIHLKNIQSVNVRSPGPHCAQTEVIATLKNGKKAC |
| | | LNPASPMVQKIIEKILNKGSTN |
| 748 | CXCL4 | MAYYEESIIFDTDNSSEESGDFDVDFQGPCERAPNYDFHKIFLP |
| | | TVFGIIFILGIFGNGLVVIVMGFQNKCKTSMTDKYRLHLSVAD |
| | | LMFVLTLPFWAVDAASSWYFGGFLCKAVHMIYTVNLYSSVLI |
| | | LAFISLDRYLAVVRATATSSQATRKLLAGKVIYVCVWLPAAIL |
| | | TVPDLVFASSFEVELDMGGSRMICQRIYPLESNHIWVAAFRFQ |
| | | HILVGFVLPGLVILTCYCIIISKLSQGSKGQALKRKALKTTVILI |
| | | LCFFCCWLPYCAGIFVDTLMNLEVIPHSCALEQGVMKWISITE |
| | | VLAYFHCCLNPILYAFLGVKFKKSARNALTFSSRSSHKMLTKK |
| | | RGAISSASTESESSSVLYS |
| 749 | CXCL5 | MSLLSSRAARVPGPSSSLCALLVLLLLLTQPGPIASAGPAAAVL |
| | | RELRCVCLQTTQGVHPKMISNLQVFAIGPQCSKVEVVASLKN |
| | | GKEICLDPEAPFLKKVIQKILDGGNKEN |
| 750 | CXCL6 | MSLPSSRAARVPGPSGSLCALLALLLLLTPPGPLASAGPVSAV |
| | | LTELRCTCLRVTLRVNPKTIGKLQVFPAGPQCSKVEVVASLKN |
| | | GKQVCLDPEAPFLKKVIQKILDSGNKKN |
| 751 | CXCL7 | MSLRLDTTPSCNSARPLHALQVLLLLSLLLTALASSTKGQTKR |
| | | NLAKGKEESLDSDLYAELRCMCIKTTSGIHPKNIQSLEVIGKGT |
| | | HCNQVEVIATLKDGRKICLDPDAPRIKKIVQKKLAGDESAD |
| 752 | CXCL8 | MTSKLAVALLAAFLISAALCEGAVLPRSAKELRCQCIKTYSKP |
| | | FHPKFIKELRVIESGPHCANTEIIVKLSDGRELCLDPKENWVQR |
| | | VVEKFLKRAENS |
| 753 | CXCL9 | MKKSGVLFLLGIILLVLIGVQGTPVVRKGRCSCISTNQGTIHLQ |
| | | SLKDLKQFAPSPSCEKIEIIATLKNGVQTCLNPDSADVKELIKK |
| | | WEKQVSQKKKQKNGKKHQKKKVLKVRKSQRSRQKKTT |
| 754 | CXCL10 | MNQTAILICCLIFLTLSGIQGVPLSRTVRCTCISISNQPVNPRSLE |
| | | KLEIIPASQFCPRVEIIATMKKKGEKRCLNPESKAIKNLLKAVS |
| | | KERSKRSP |
| 755 | CXCL11 | MSVKGMAIALAVILCATVVQGFPMFKRGRCLCIGPGVKAVK |
| | | VADIEKASIMYPSNNCDKIEVIITLKENKGQRCLNPKSKQARLI |
| | | IKKVERKNF |
| 756 | CXCL12 | MNAKVVVVLVLVLTALCLSDGKPVSLSYRCPCRFFESHVARA |
| | | NVKHLKILNTPNCALQIVARLKNNNRQVCIDPKLKWIQEYLE |
| | | KALNKRFKM |
| 757 | CXCL13 | MKFISTSLLLMLLVSSLSPVQGVLEVYYTSLRCRCVQESSVFIP |
| | | RRFIDRIQILPRGNGCPRKEIIVWKKNKSIVCVDPQAEWIQRM |
| | | MEVLRKRSSSTLPVPVFKRKIP |
| 758 | CXCL14 | MSLLPRRAPPVSMRLLAAALLLLLLALYTARVDGSKCKCSRK |
| | | GPKIRYSDVKKLEMKPKYPHCEEKMVIITTKSVSRYRGQEHCL |
| | | HPKLQSTKRFIKWYNAWNEKRRVYEE |
| 759 | CXCL15 | MAAQGWSMLLLAVLNLGIFVRPCDTQELRCLCIQEHSEFIPLK |
| | | LIKNIMVIFETIYCNRKEVIAVPKNGSMICLDPDAPWVKATVG |
| | | PITNRFLPEDLKQKEFPPAMKLLYSVEHEKPLYLSFGRPENKRI |
| | | FPFPIRETSRHFADLAHNSDRNFLRDSSEVSLTGSDA |
| 760 | CXCL16 | MGRDLRPGSRVLLLLLLLLLVYLTQPGNGNEGSVTGSCYCGK |
| | | RISSDSPPSVQFMNRLRKHLRAYHRCLYYTRFQLLSWSVCGG |
| | | NKDPWVQELMSCLDLKECGHAYSGIVAHQKHLLPTSPPISQA |
| | | SEGASSDIHTPAQMLLSTLQSTQRPTLPVGSLSSDKELTRPNET |
| | | TIHTAGHSLAAGPEAGENQKQPEKNAGPTARTSATVPVLCLL |
| | | AIIFILTAALSYVLCKRRRGQSPQSSPDLPVHYIPVAP |
| 761 | CXCL17 | MKVLISSLLLLLPLMLMSMVSSSLNPGVARGHRDRGQASRRW |
| | | LQEGGQECECKDWFLRAPRRKFMTVSGLPKKQCPCDHFKGN |
| | | VKKTRHQRHHRKPNKHSRACQQFLKQCQLRSFALPL |
| 762 | XCL1 | MRLLILALLGICSLTAYIVEGVGSEVSDKRTCVSLTTQRLPVSR |
| | | IKTYTITEGSLRAVIFITKRGLKVCADPQATWVRDVVRSMDRK |
| | | SNTRNNMIQTKPTGTQQSTNTAVTLTG |
| 763 | XCL2 | MRLLILALLGICSLTAYIVEGVGSEVSHRRTCVSLTTQRLPVSR |
| | | IKTYTITEGSLRAVIFITKRGLKVCADPQATWVRDVVRSMDRK |
| | | SNTRNNMIQTKPTGTQQSTNTAVTLTG |
| 764 | CX3CL1 | MAPISLSWLLRLATFCHLTVLLAGQHHGVTKCNITCSKMTSKI |
| | | PVALLIHYQQNQASCGKRAIILETRQHRLFCADPKEQWVKDA |
| | | MQHLDRQAAALTRNGGTFEKQIGEVKPRTTPAAGGMDESVV |
| | | LEPEATGESSSLEPTPSSQEAQRALGTSPELPTGVTGSSGTRLPP |
| | | TPKAQDGGPVGTELFRVPPVSTAATWQSSAPHQPGPSLWAEA |
| | | KTSEAPSTQDPSTQASTASSPAPEENAPSEGQRVWGQGQSPRP |
| | | ENSLEREEMGPVPAHTDAFQDWGPGSMAHVSVVPVSSEGTPS |
| | | REPVASGSWTPKAEEPIHATMDPQRLGVLITPVPDAQAATRR |
| | | QAVGLLAFLGLLFCLGVAMFTYQSLQGCPRKMAGEMAEGLR |
| | | YIPRSCGSNSYVLVPV |
| 765 | Tbet | HLLWSKFNQHQTEMIITKQGRRMFPFLSFTVAGLEPTSHYRMF |
| | | VDVVLVDQHHWRYQSGKWVQCGKAEGSMPGNRLYVHPDSP |
| | | NTGAHWMRQEVSFGKLKLTNNKGASNNVTQMIVLQSLHKY |
| | | QPRLHIVEVNEGEPETVCNASNTHIFTFQETQFIAVTAYQNAEI |
| | | TQLKIDNNPFAKGFRENFESMYASVDTSVPSPPGPNCQLLGGD |
| | | PYSPLLSNQYPVP |
| 766 | GATA3 | MEVTADQPRWVSHHHPAVLNGQHPDTHHPGLSHSYMDAAQ |
| | | YPLPEEVDVLFNIDGQGNHVPPYYGNSVRATVQRYPPTHHGS |
| | | QVCRPPLLHGSLPWLDGGKALGSHHTASPWNLSPFSKTSIHH |
| | | GSPGPLSVYPPASSSSLSGGHASPHLFTFPPTPPKDVSPDPSLST |
| | | PGSAGSARQDEKECLKYQVPLPDSMKLESSHSRGSMTALGGA |
| | | SSSTHHPITTYPPYVPEYSSGLFPPSSLLGGSPTGFGCKSRPKAR |
| | | SSTGRECVNCGATSTPLWRRDGTGHYLCNACGLYHKMNGQN |
| | | RPLIKPKRRLSAARRAGTSCANCQTTTTTLWRRNANGDPVCN |
| | | ACGLYYKLHNINRPLTMKKEGIQTRNRKMSSKSKKCKKVHD |
| | | SLEDFPKNSSFNPAALSRHMSSLSHISPFSHSSHMLTTPTPMHP |
| | | PSSLSFGPHHPSSMVTAMG |
| 767 | RORgt | MDRAPQRQHRASRELLAAKKTHTSQIEVIPCKICGDKSSGIHY |
| | | GVITCEGCKGFFRRSQRCNAAYSCTRQQNCPIDRTSRNRCQHC |
| | | RLQKCLALGMSRDAVKFGRMSKKQRDSLHAEVQKQLQQRQ |
| | | QQQQEPVVKTPPAGAQGADTLTYTLGLPDGQLPLGSSPDLPE |
| | | ASACPPGLLKASGSGPSYSNNLAKAGLNGASCHLEYSPERGK |
| | | AEGRESFYSTGSQLTPDRCGLRFEEHRHPGLGELGQGPDSYGS |
| | | PSFRSTPEAPYASLTEIEHLVQSVCKSYRETCQLRLEDLLRQRS |
| | | NIFSREEVTGYQRKSMWEMWERCAHHLTEAIQYVVEFAKRL |
| | | SGFMELCQNDQIVLLKAGAMEVVLVRMCRAYNADNRTVFFE |
| | | GKYGGMELFRALGCSELISSIFDFSHSLSALHFSEDEIALYTAL |
| | | VLINAHRPGLQEKRKVEQLQYNLELAFHHHLCKTHRQSILAK |
| | | LPPKGKLRSLCSQHVERLQIFQHLHPIVVQAAFPPLYKELFSTE |
| | | TESPVGLSK |
| 768 | Cd25 | MEPCLLMWGILTFITVSGYTTDLCDDDPPNLKHATFKALTYK |
| | | TGTVLNCDCERGFRRISSYMHCTGNSSHASWENKCQCKSISPE |
| | | NRKGKVTTKPEEQKGENPTEMQSQTPPMDEVDLVGHCREPPP |
| | | WEHENSKRIYHFVVGQTLHYQCMQGFTALHRGPAKSICKTIF |
| | | GKTRWTQPPLKCISESQFPDDEELQASTDAPAGRDTSSPFITTS |
| | | TPDFHKHTEVATTMESFIFTTEYQIAVASCVLLLISIVLVSGLT |
| | | WQRRRRKSRTI |
| 769 | Skp1 | MPSIKLQSSDGEIFEVDVEIAKQSVTIKTMLEDLGMDDEGDDD |
| | | PVPLPNVNAAILKKVIQWCTHHKDDPPPPEDDENKEKRTDDIP |
| | | VWDQEFLKVDQGTLFELILAANYLDIKGLLDVTCKTVANMIK |
| | | GKTPEEIRKTFNIKNDFTEEEEAQVRKENQWCEEK |
| 770 | Spy | MRKLTALFVASTLALGAANLAHAADTTTAAPADAKPMMHH |
| | | KGKFGPHQDMMFKDLNLTDAQKQQIREIMKGQRDQMKRPPL |
| | | EERRAMHDIIASDTFDKAKAEAQIAKMEEQRKANMLAHMET |
| | | QNKIYNILTPEQKKQFNANFEKRLTERPAAKGKMPATAE |
| 771 | Fkpa | MKSLFKVTLLATTMAVALHAPITFAAEAAKPATAADSKAAFK |
| | | NDDQKSAYALGASLGRYMENSLKEQEKLGIKLDKDQLIAGV |
| | | QDAFADKSKLSDQEIEQTLQAFEARVKSSAQAKMEKDAADN |
| | | EAKGKEYREKFAKEKGVKTSSTGLVYQVVEAGKGEAPKDSD |
| | | TVVVNYKGTLIDGKEFDNSYTRGEPLSFRLDGVIPGWTEGLK |
| | | NIKKGGKIKLVIPPELAYGKAGVPGIPPNSTLVFDVELLDVKPA |
| | | PKADAKPEADAKAADSAKK |
| 772 | Sura | MKNWKTLLLGIAMIANTSFAAPQVVDKVAAVVNNGVVLESD |
| | | VDGLMQSVKLNAAQARQQLPDDATLRHQIMERLIMDQIILQM |
| | | GQKMGVKISDEQLDQAIANIAKQNNMTLDQMRSRLAYDGLN |
| | | YNTYRNQIRKEMIISEVRNNEVRRRITILPQEVESLAQQVGNQ |
| | | NDASTELNLSHILIPLPENPTSDQVNEAESQARAIVDQARNGA |
| | | DFGKLAIAHSADQQALNGGQMGWGRIQELPGIFAQALSTAKK |
| | | GDIVGPIRSGVGFHILKVNDLRGESKNISVTEVHARHILLKPSPI |
| | | MTDEQARVKLEQIAADIKSGKTTFAAAAKEFSQDPGSANQGG |
| | | DLGWATPDIFDPAFRDALTRLNKGQMSAPVHSSFGWHLIELL |
| | | DTRNVDKTDAAQKDRAYRMLMNRKFSEEAASWMQEQRASA |
| | | YVKILSN |
| 773 | Hsp60 | MLRVNSKSSIKTFVRHLSHKELKFGVEGRAALLKGVNTLADA |
| | | VSVTLGPKGRNVLIEQQFGAPKITKDGVTVAKAITLEDKFEDL |
| | | GAKLLQEVASKTNESAGDGTTSATVLGRSIFTESVKNVAAGC |
| | | NPMDLRRGSQAAVEAVIEFLQKNKKEITTSEEIAQVATISANG |
| | | DKHIGDLLANAMEKVGKEGVITVKEGKTLEDELEVTEGMKF |
| | | DRGFISPYFITNTKTGKVEFENPLILLSEKKISSIQDILPSLELSN |
| | | QTRRPLLIIAEDVDGEALAACILNKLRGQVQVCAVKAPGFGD |
| | | NRKNTLGDIAILSGGTVFTEELDIKPENATIEQLGSAGAVTITK |
| | | EDTVLLNGEGSKDNLEARCEQIRSVIADVHTTEYEKEKLQERL |
| | | AKLSGGVAVIKVGGASEVEVGEKKDRYEDALNATRAAVEEG |
| | | ILPGGGTALIKATKILDEVKEKAVNFDQKLGVDTIRAAITKPA |
| | | KRIIENAGEEGAVIVGKIYDEPEFNKGYDSQKGEFTDMIAAGII |
| | | DPFKVVKNGLVDASGVASLLATTECAIVDAPQPKGSPAAPPA |
| | | PGMGGMPGMF |
| 774 | Hsp70 | MAPAVGIDLGTTYSCVGIFRDDRIEIIANDQGNRTTPSFVAFTD |
| | | TERLIGDAAKNQVAMNPANTVFDAKRLIGRKFADPEVQADM |
| | | KHFPFKITDKGGKPVIQVEFKGETKEFTPEEISSMVLTKMRETA |
| | | EAYLGGTVNNAVVTVPAYFNDSQRQATKDAGLIAGLNVLRII |
| | | NEPTAAAIAYGLDKKADGERNVLIFDLGGGTFDVSLLTIEEGIF |
| | | EVKSTAGDTHLGGEDFDNRLVNHFVSEFKRKFKKISPAERAR |
| | | ALRRSPTACERAKRTLSSAAQTSIEIDSLYEGIDFYTSITRARFE |
| | | ELCQDLFRSTMEPVERVLRDAKIDKSSVHEIVLVGGSTRIPRIQ |
| | | KLVSDFFNGKEPNKSINPDEAVAYGAAVQAAILSGDTSSKSTN |
| | | EILLLDVAPLSLGIETAGGVMTPLIKRNTTIPTKKSETFSTFSDN |
| | | QPGVLIQVFEGERARTKDNNLLGKFELTGIPRARGVPQIEVTF |
| | | DVDANGIMNVSALEKGTRKTNKIVITNDKGRLSKEEIERMLA |
| | | EAEKYKAEDEAEASRIRPKNGLESYAYSLRNSLRHSKVDEKL |
| | | EAGDKEKLKSEIDKTVQWLDENQTATKEEYESQQKELEAVA |
| | | NPIMMKFYAGGEGAPGGFPGAGGPGGFPGGPGAGHASGGGD |
| | | DGPTVEEVDLKFPMLPLPWQLSVRKMHRPFFLFLLFLIFLIFLIL |
| | | FLFYFFLPVRFNESCFS |
| 775 | GroEL | MAAKDVKFGNDARVKMLRGVNVLADAVKVTLGPKGRNVV |
| | | LDKSFGAPTITKDGVSVAREIELEDKFENMGAQMVKEVASKA |
| | | NDAAGDGTTTATVLAQAIITEGLKAVAAGMNPMDLKRGIDK |
| | | AVTAAVEELKALSVPCSDSKAIAQVGTISANSDETVGKLIAEA |
| | | MDKVGKEGVITVEDGTGLQDELDVVEGMQFDRGYLSPYFIN |
| | | KPETGAVELESPFILLADKKISNIREMLPVLEAVAKAGKPLLIIA |
| | | EDVEGEALATLVVNTMRGIVKVAAVKAPGFGDRRKAMLQDI |
| | | ATLTGGTVISEEIGMELEKATLEDLGQAKRVVINKDTTTIIDGV |
| | | GEEAAIQGRVAQIRQQIEEATSDYDREKLQERVAKLAGGVAV |
| | | IKVGAATEVEMKEKKARVEDALHATRAAVEEGVVAGGGVA |
| | | LIRVASKLADLRGQNEDQNVGIKVALRAMEAPLRQIVLNCGE |
| | | EPSVVANTVKGGDGNYGYNAATEEYGNMIDMGILDPTKVTR |
| | | SALQYAASVAGLMITTECMVTDLPKNDAADLGAAGGMGGM |
| | | GGMGGMM |
| 776 | GroES | MNIRPLHDRVIVKRKEVETKSAGGIVLTGSAAAKSTRGEVLA |
| | | VGNGRILENGEVKPLDVKVGDIVIFNDGYGVKSEKIDNEEVLI |
| | | MSESDILAIVEA |
| 777 | Hsp90-alpha | MPEETQTQDQPMEEEEVETFAFQAEIAQLMSLIINTFYSNKEIF |
| | | LRELISNSSDALDKIRYESLTDPSKLDSGKELHINLIPNKQDRTL |
| | | TIVDTGIGMTKADLINNLGTIAKSGTKAFMEALQAGADISMIG |
| | | QFGVGFYSAYLVAEKVTVITKHNDDEQYAWESSAGGSFTVRT |
| | | DTGEPMGRGTKVILHLKEDQTEYLEE |
| | | RRIKEIVKKHSQFIGYPITLFVEKERDKEVSDDEAEEKEDKEEE |
| | | KEKEEKESEDKPEIEDVGSDEEEEKKDGDKKKKKKIKEKYIDQ |
| | | EELNKTKPIWTRNPDDITNEEYGEFYKSLTNDWEDHLAVKHF |
| | | SVEGQLEFRALLFVPRRAPFDLFENRKKKNNIKLYVRRVFIMD |
| | | NCEELIPEYLNFIRGVVDSEDLPLNISR |
| | | EMLQQSKILKVIRKNLVKKCLELFTELAEDKENYKKFYEQFSK |
| | | NIKLGIHEDSQNRKKLSELLRYYTSASGDEMVSLKDYCTRMK |
| | | ENQKHIYYITGETKDQVANSAFVERLRKHGLEVIYMIEPIDEY |
| | | CVQQLKEFEGKTLVSVTKEGLELPEDEEEKKKQEEKKTKFEN |
| | | LCKIMKDILEKKVEKVVVSNRLVTSPCCIV |
| | | TSTYGWTANMERIMKAQALRDNSTMGYMAAKKHLEINPDHS |
| | | IIETLRQKAEADKNDKSVKDLVILLYETALLSSGFSLEDPQTHA |
| | | NRIYRMIKLGLGIDEDDPTADDTSAAVTEEMPPLEGDDDTSR |
| | | MEEVD |
| 778 | HtpG | MKGQETRGFQSEVKQLLHLMIHSLYSNKEIFLRELISNASDAA |
| | | DKLRFRALSNPDLYEGDGELRVRVSFDKDKRTLTISDNGVGM |
| | | TRDEVIDHLGTIAKSGTKSFLESLGSDQAKDSQLIGQFGVGFYS |
| | | AFIVADKVTVRTRAAGEKPENGVFWESAGEGEYTVADITKED |
| | | RGTEITLHLREGEDEFLDDWRVRSIISKY |
| | | SDHIALPVEIEKREEKDGETVISWEKINKAQALWTRNKSEITDE |
| | | EYKEFYKHIAHDFNDPLTWSHNRVEGKQEYTSLLYIPSQAPW |
| | | DMWNRDHKHGLKLYVQRVFIMDDAEQFMPNYLRFVRGLIDS |
| | | SDLPLNVSREILQDSTVTRNLRN |
| | | ALTKRVLQMLEKLAKDDAEKYQTFWQQFGLVLKEGPAEDFA |
| | | NQEAIAKLLRFASTHTDSSAQTVSLEDYVSRMKEGQEKIYYIT |
| | | ADSYAAAKSSPHLELLRKKGIEVLLLSDRIDEWMMNYLTEFD |
| | | GKPFQSVSKVDESLEKLADEVDESAKEAEKALTPFIDRVKALL |
| | | GERVKDVRLTHRLTDTPAIVSTDADEMSTQM |
| | | AKLFAAAGQKVPEVKYIFELNPDHVLVKRAADTEDEAKFSE |
| | | WVELLLDQALLAERGTLEDPNLFIRRMNQLLVS |
| 779 | Hsp40 | MGKDYYQTLGLARGASDEEIKRAYRRQALRYHPDKNKEPGA |
| | | EEKFKEIAEAYDVLSDPRKREIFDRYGEEGLKGSGPSGGSGGG |
| | | ANGTSFSYTFHGDPHAMFAEFFGGRNPFDTFFGQRNGEEGMD |
| | | IDDPFSGFPMGMGGFTNVNFGRSRSAQEPARKKQDPPVTHDL |
| | | RVSLEEIYSGCTKKMKISHKRLNPDGKSIRNEDKILTIEVKKG |
| | | WKEGTKITFPKEGDQTSNNIPADIVFVLKDKPHNIFKRDGSDVI |
| | | YPARISLREALCGCTVNVPTLDGRTIPVVFKDVIRPGMRRKVP |
| | | GEGLPLPKTPEKRGDLIIEFEVIFPERIPQTSRTVLEQVLPI |
| 780 | ClpP | MWPGILVGGARVASCRYPALGPRLAAHFPAQRPPQRTLQNGL |
| | | ALQRCLHATATRALPLIPIVVEQTGRGERAYDIYSRLLRERIVC |
| | | VMGPIDDSVASLVIAQLLFLQSESNKKPIHMYINSPGGVVTAG |
| | | LAIYDTMQYILNPICTWCVGQAASMGSLLLAAGTPGMRHSLP |
| | | NSRIMIHQPSGGARGQATDIAIQAEEIMKLKKQLYNIYAKHTK |
| | | QSLQVIESAMERDRYMSPMEAQEFGILDKVLVHPPQDGEDEP |
| | | TLVQKEPVEAAPAAEPVPAST |
| 781 | ClpX | MPSCGACTCGAAAVRLITSSLASAQRGISGGRIHMSVLGRLGT |
| | | FETQILQRAPLRSFTETPAYFASKDGISKDGSGDGNKKSASEGS |
| | | SKKSGSGNSGKGG |
| | | NQLRCPKCGDLCTHVETFVSSTRFVKCEKCHHFFVVLSEADS |
| | | KKSIIKEPESAAEAVKLAFQQKPPPPPKKIYNYLDKYVVGQSF |
| | | AKKVLSVAVYNHYKRIYNNIPANLRQQAEVEKQTSLTPRELEI |
| | | RRREDEYRFTKLLQIAGISPHG |
| | | NALGASMQQQVNQQIPQEKRGGEVLDSSHDDIKLEKSNILLL |
| | | GPTGSGKTLLAQTLAKCLDVPFAICDCTTLTQAGYVGEDIESV |
| | | IAKLLQDANYNVEKAQQGIVFLDEVDKIGSVPGIHQLRDVGG |
| | | EGVQQGLLKLLEGTIVNVPEKNSRKLRGETVQVDTTNILFVAS |
| | | GAFNGLDRIISRRKNEKYLGFGTPSNLGKG |
| | | RRAAAAADLANRSGESNTHQDIEEKDRLLRHVEARDLIEFGM |
| | | IPEFVGRLPVVVPLHSLDEKTLVQILTEPRNAVIPQYQALFSMD |
| | | KCELNVTEDALKAIARLALERKTGARGLRSIMEKLLLEPMFEV |
| | | PNSDIVCVEVDKEVVEGKKEPGYIRAPTKESSEEEYDSGVEEE |
| | | GWPRQADAANS |
| 782 | CDKN1C | MSDASLRSTSTMERLVARGTFPVLVRTSACRSLFGPVDHEELS |
| | | RELQARLAELNAEDQNRWDYDFQQDMPLRGPGRLQWTEVD |
| | | SDSVPAFYRETVQVGRCRLLLAPRPVAVAVAVSPPLEPAAESL |
| | | DGLEEAPEQLPSVPVPAPASTPPPVPVLAPAPAPAPAPVAAPV |
| | | AAPVAVAVLAPAPAPAPAPAPAPAPVAAPAPAPAPAPAPAPA |
| | | PAPAPDAAPQESAEQGANQGQRGQEPLADQLHSGISGRPAAG |
| | | TAAASANGAAIKKLSGPLISDFFAKRKRSAPEKSSGDVPAPCPS |
| | | PSAAPGVGSVEQTPRKRLR |
| 783 | BAX inhibitor | MNIFDRKINFDALLKFSHITPSTQQHLKKVYASFALCMFVAAA |
| | | GAYVHMVTHFIQAGLLSALGSLILMIWLMATPHSHETEQKRL |
| | | GLLAGFAFLTGVGLGPALEFCIAVNPSILPTAFMGTAMIFTCFT |
| | | LSALYARRRSYLFLGGILMSALSLLLLSSLGNVFFGSIWLFQAN |
| | | LYVGLVVMCGFVLFDTQLIIEKAEHGD |
| 784 | codA | MSNNALQTIINARLPGEEGLWQIHLQDGKISAIDAQSGVMPIT |
| | | ENSLDAEQGLVIPPFVEPHIHLDTTQTAGQPNWNQSGTLFEGIE |
| | | RWAERKALLTHDDVKQRAWQTLKWQIANGIQHVRTHVDVS |
| | | DATLTALKAMLEVKQEVAPWIDLQIVAFPQEGIQDYIWHCIDL |
| | | FLDFITVFRKLMMILAMNEKDKKKEKKLSYPNGEALLEEALR |
| | | LGADVVGAIPHFEFTREYGVESLHKTFALAQKYDRLIDVHCD |
| | | EIDDEQSRFVETVAALAHHEGMGARVTASHTTAMHSYNGAY |
| | | TSRLFRLLKMSGINFVANPLVNIHLQGRFDTYPKRRGITRVKE |
| | | MLESGINVCFGHDDVFDPWYPLGTANMLQVLHMGLHVCQL |
| | | MGYGQINDGLNLITHHSARTLNLQDYGIAAGNSANLIILPAEN |
| | | GFDALRRQVPVRYSVRGGKVIASTQPAQTTVYLEQPEAIDYK |
| | | R |

[1257] In some embodiments, a circular RNA or a precursor RNA (e.g., linear precursor RNA) disclosed herein comprises a sequence as listed in Table 29.

[1258] In some embodiments, a polynucleotide or a protein encoded by a polynucleotide contains a sequence with at least about 70%, 75%, 80%, 85%, 90%, 91%, 92%, 93%, 94%, 95%, 96%, 97%, 98%, 99%, or 99.5% similarity to one or more sequences disclosed herein. In some embodiments, a polynucleotide or a protein encoded by a polynucleotide contains a sequence that is identical to one or more sequences disclosed herein.

[1259] Preferred embodiments are described herein. Variations of those preferred embodiments may become apparent to those of ordinary skill in the art upon reading the foregoing description. The inventors expect skilled artisans to employ such variations as appropriate, and the inventors intend for the invention to be practiced otherwise than as specifically described herein. Accordingly, this invention includes all modifications and equivalents of the subject matter recited in the claims appended hereto as permitted by applicable law. Moreover, any combination of the above-described elements in all possible variations thereof is encompassed by the invention unless otherwise indicated herein or otherwise clearly contradicted by context.

### EXAMPLES

[1260] Wesselhoeft et al., (2019) RNA Circularization Diminishes Immunogenicity and Can Extend Translation Duration In vivo. Molecular Cell. 74(3), 508-520 and Wesselhoeft et al., (2018) Engineering circular RNA for Potent and Stable Translation in Eukaryotic Cells. Nature Communications. 9, 2629 are incorporated by reference in their entirety.

[1261] The invention is further described in detail by reference to the following examples but are not intended to be limited to the following examples. These examples encompass any and all variations of the illustrations with the intention of providing those of ordinary skill in the art with complete disclosure and description of how to make and use the subject invention and are not intended to limit the scope of what is regarded as the invention.

### Example 1

### Example 1A: External Homology Regions Allow for Circularization of Long Precursor RNA Using the Permuted Intron Exon (PIE) Circularization Strategy

[1262] A 1,100 nt sequence containing a full-length encephalomyocarditis virus (EMCV) IRES, a Gaussia luciferase (GLuc) expression sequence, and two short exon fragments of the permuted intron-exon (PIE) construct were inserted between the 3′ and 5′ introns of the permuted group I catalytic intron in the thymidylate synthase (Td) gene of the T4 phage. Precursor RNA was synthesized by run-off transcription. Circularization was attempted by heating the precursor RNA in the presence of magnesium ions and GTP, but splicing products were not obtained.

[1263] Perfectly complementary 9 nucleotide and 19 nucleotide long homology regions were designed and added at the 5′ and 3′ ends of the precursor RNA. Addition of these homology arms increased splicing efficiency from 0 to 16% for 9 nucleotide homology regions and to 48% for 19 nucleotide homology regions as assessed by disappearance of the precursor RNA band.

[1264] The splicing product was treated with RNase R. Sequencing across the putative splice junction of RNase R-treated splicing reactions revealed ligated exons, and digestion of the RNase R-treated splicing reaction with oligonucleotide-targeted RNase H produced a single band in contrast to two bands yielded by RNase H-digested linear precursor. This shows that circular RNA is a major product of the splicing reactions of precursor RNA containing the 9 or 19 nucleotide long external homology regions.

### Example 1B: Spacers that Conserve Secondary Structures of IRES and PIE Splice Sites Increase Circularization Efficiency

[1265] A series of spacers was designed and inserted between the 3′ PIE splice site and the IRES. These spacers were designed to either conserve or disrupt secondary structures within intron sequences in the IRES, 3′ PIE splice site, and/or 5′ splice site. The addition of spacer sequences designed to conserve secondary structures resulted in 87% splicing efficiency, while the addition of a disruptive spacer sequences resulted in no detectable splicing.

### Example 2

### Example 2A: Internal Homology Regions in Addition to External Homology Regions Creates a Splicing Bubble and Allows for Translation of Several Expression Sequences

[1266] Spacers were designed to be unstructured, non-homologous to the intron and IRES sequences, and to contain spacer-spacer homology regions. These were inserted between the 5′ exon and IRES and between the 3′ exon and expression sequence in constructs containing external homology regions, EMCV IRES, and expression sequences for Gaussia luciferase (total length: 1289 nt), Firefly luciferase (2384 nt), eGFP (1451 nt), human erythropoietin (1313 nt), and Cas9 endonuclease (4934 nt). Circularization of all 5 constructs was achieved. Circularization of constructs utilizing T4 phage and Anabaena introns were roughly equal. Circularization efficiency was higher for shorter sequences. To measure translation, each construct was transfected into HEK293 cells. Gaussia and Firefly luciferase transfected cells produced a robust response as measured by luminescence, human erythropoietin was detectable in the media of cells transfected with erythropoietin circRNA, and EGFP fluorescence was observed from cells transfected with EGFP circRNA. Co-transfection of Cas9 circRNA with sgRNA directed against GFP into cells constitutively expressing GFP resulted in ablated fluorescence in up to 97% of cells in comparison to an sgRNA-only control.

### Example 2B: Use of CVB3 IRES Increases Protein Production

[1267] Constructs with internal and external homology regions and differing IRES containing either Gaussia luciferase or Firefly luciferase expression sequences were made. Protein production was measured by luminescence in the supernatant of HEK293 cells 24 hours after transfection. The Coxsackievirus B3 (CVB3) IRES construct produced the most protein in both cases.

### Example 2C: Use of polyA or polyAC Spacers Increases Protein Production

[1268] Thirty nucleotide long polyA or polyAC spacers were added between the IRES and splice junction in a construct with each IRES that produced protein in example 2B. Gaussia luciferase activity was measured by luminescence in the supernatant of HEK293 cells 24 hours after transfection. Both spacers improved expression in every construct over control constructs without spacers.

### Example 3

### HEK293 or HeLa Cells Transfected with Circular RNA Produce More Protein than Those Transfected with Comparable Unmodified or Modified Linear RNA

[1269] HPLC-purified Gaussia luciferase-coding circRNA (CVB3-GLuc-pAC) was compared with a canonical unmodified 5′ methylguanosine-capped and 3′ polyA-tailed linear GLuc mRNA, and a commercially available nucleoside-modified (pseudouridine, 5-methylcytosine) linear GLuc mRNA (from Trilink). Luminescence was measured 24 h post-transfection, revealing that circRNA produced 811.2% more protein than the unmodified linear mRNA in HEK293 cells and 54.5% more protein than the modified mRNA. Similar results were obtained in HeLa cells and a comparison of optimized circRNA coding for human erythropoietin with linear mRNA modified with 5-methoxyuridine.

[1270] Luminescence data was collected over 6 days. In HEK293 cells, circRNA transfection resulted in a protein production half-life of 80 hours, in comparison with the 43 hours of unmodified linear mRNA and 45 hours of modified linear mRNA. In HeLa cells, circRNA transfection resulted in a protein production half-life of 116 hours, in comparison with the 44 hours of unmodified linear mRNA and 49 hours of modified linear mRNA. CircRNA produced substantially more protein than both the unmodified and modified linear mRNAs over its lifetime in both cell types.

### Example 4

### Example 4A: Purification of circRNA by RNase Digestion, HPLC Purification, and Phosphatase Treatment Decreases Immunogenicity. Completely Purified Circular RNA is Significantly Less Immunogenic than Unpurified or Partially Purified Circular RNA. Protein Expression Stability and Cell Viability are Dependent on Cell Type and Circular RNA Purity

[1271] Human embryonic kidney 293 (HEK293) and human lung carcinoma A549 cells were transfected with:
[1272] products of an unpurified GLuc circular RNA splicing reaction,
[1273] products of RNase R digestion of the splicing reaction,
[1274] products of RNase R digestion and HPLC purification of the splicing reaction, or
[1275] products of RNase digestion, HPLC purification, and phosphatase treatment of the splicing reaction.

[1276] RNase R digestion of splicing reactions was insufficient to prevent cytokine release in A549 cells in comparison to untransfected controls.

[1277] The addition of HPLC purification was also insufficient to prevent cytokine release, although there was a significant reduction in interleukin-6 (IL-6) and a significant increase in interferon-α1 (IFN-α1) compared to the unpurified splicing reaction.

[1278] The addition of a phosphatase treatment after HPLC purification and before RNase R digestion dramatically reduced the expression of all upregulated cytokines assessed in A549 cells. Secreted monocyte chemoattractant protein 1 (MCP1), IL-6, IFN-α1, tumor necrosis factor α (TNFα), and IFNγ inducible protein-10 (IP-10) fell to undetectable or untransfected baseline levels.

[1279] There was no substantial cytokine release in HEK293 cells. A549 cells had increased GLuc expression stability and cell viability when transfected with higher purity circular RNA. Completely purified circular RNA had a stability phenotype similar to that of transfected 293 cells.

### Example 4B: Circular RNA does not Cause Significant Immunogenicity and is not a RIG-I Ligand

[1280] A549 cells were transfected with the products of a splicing reaction:

[1281] A549 cells were transfected with:
[1282] unpurified circular RNA,
[1283] high molecular weight (linear and circular concatenations) RNA,
[1284] circular (nicked) RNA,
[1285] an early fraction of purified circular RNA (more overlap with nicked RNA peak),
[1286] a late fraction of purified circular RNA (less overlap with nicked RNA peak),
[1287] introns excised during circularization, or
[1288] vehicle (i.e. untransfected control).

[1289] Precursor RNA was separately synthesized and purified in the form of the splice site deletion mutant (DS) due to difficulties in obtaining suitably pure linear precursor RNA from the splicing reaction. Cytokine release and cell viability was measured in each case.

[1290] Robust IL-6, RANTES, and IP-10 release was observed in response to most of the species present within the splicing reaction, as well as precursor RNA. Early circRNA fractions elicited cytokine responses comparable to other non-circRNA fractions, indicating that even relatively small quantities of linear RNA contaminants are able to induce a substantial cellular immune response in A549 cells. Late circRNA fractions elicited no cytokine response in excess of that from untransfected controls. A549 cell viability 36 hours post-transfection was significantly greater for late circRNA fractions compared with all of the other fractions.

[1291] RIG-I and IFN-β1 transcript induction upon transfection of A549 cells with late circRNA HPLC fractions, precursor RNA or unpurified splicing reactions were analyzed. Induction of both RIG-I and IFN-β1 transcripts were weaker for late circRNA fractions than precursor RNA and unpurified splicing reactions. RNase R treatment of splicing reactions alone was not sufficient to ablate this effect. Addition of very small quantities of the RIG-I ligand 3p-hpRNA to circular RNA induced substantial RIG-I transcription. In HeLa cells, transfection of RNase R-digested splicing reactions induced RIG-I and IFN-β1, but purified circRNA did not. Overall, HeLa cells were less sensitive to contaminating RNA species than A549 cells.

[1292] A time course experiment monitoring RIG-I, IFN-β1, IL-6, and RANTES transcript induction within the first 8 hours after transfection of A549 cells with splicing reactions or fully purified circRNA did not reveal a transient response to circRNA. Purified circRNA similarly failed to induce pro-inflammatory transcripts in RAW264.7 murine macrophages.

[1293] A549 cells were transfected with purified circRNA containing an EMCV IRES and EGFP expression sequence. This failed to produce substantial induction of pro-inflammatory transcripts. These data demonstrate that non-circular components of the splicing reaction are responsible for the immunogenicity observed in previous studies and that circRNA is not a natural ligand for RIG-I.

### Example 5

### Circular RNA Avoids Detection by TLRs

[1294] TLR 3, 7, and 8 reporter cell lines were transfected with multiple linear or circular RNA constructs and secreted embryonic alkaline phosphatase (SEAP) was measured.

[1295] Linearized RNA was constructed by deleting the intron and homology arm sequences. The linear RNA constructs were then treated with phosphatase (in the case of capped RNAs, after capping) and purified by HPLC.

[1296] None of the attempted transfections produced a response in TLR7 reporter cells. TLR3 and TLR8 reporter cells were activated by capped linearized RNA, polyadenylated linearized RNA, the nicked circRNA HPLC fraction, and the early circRNA fraction. The late circRNA fraction and m1ψ-mRNA did not provoke TLR-mediated response in any cell line.

[1297] In a second experiment, circRNA was linearized using two methods: treatment of circRNA with heat in the presence of magnesium ions and DNA oligonucleotide-guided RNase H digestion. Both methods yielded a majority of full-length linear RNA with small amounts of intact circRNA. TLR3, 7, and 8 reporter cells were transfected with circular RNA, circular RNA degraded by heat, or circular RNA degraded by RNase H, and SEAP secretion was measured 36 hours after transfection. TLR8 reporter cells secreted SEAP in response to both forms of degraded circular RNA, but did not produce a greater response to circular RNA transfection than mock transfection. No activation was observed in TLR3 and TLR7 reporter cells for degraded or intact conditions, despite the activation of TLR3 by in vitro transcribed linearized RNA.

### Example 6

### Unmodified Circular RNA Produces Increased Sustained In Vivo Protein Expression than Linear RNA

[1298] Mice were injected and HEK293 cells were transfected with unmodified and m1ψ-modified human erythropoietin (hEpo) linear mRNAs and circRNAs. Equimolar transfection of m1ψ-mRNA and unmodified circRNA resulted in robust protein expression in HEK293 cells. hEpo linear mRNA and circRNA displayed similar relative protein expression patterns and cell viabilities in comparison to GLuc linear mRNA and circRNA upon equal weight transfection of HEK293 and A549 cells.

[1299] In mice, hEpo was detected in serum after the injection of hEpo circRNA or linear mRNA into visceral adipose. hEpo detected after the injection of unmodified circRNA decayed more slowly than that from unmodified or m1ψ-mRNA and was still present 42 hours post-injection. Serum hEpo rapidly declined upon the injection of unpurified circRNA splicing reactions or unmodified linear mRNA. Injection of unpurified splicing reactions produced a cytokine response detectable in serum that was not observed for the other RNAs, including purified circRNA.

### Example 7

### Circular RNA can be Effectively Delivered In Vivo or In Vitro Via Lipid Nanoparticles

[1300] Purified circular RNA was formulated into lipid nanoparticles (LNPs) with the ionizable lipidoid cKK-E12 (Dong et al., 2014; Kauffman et al., 2015). The particles formed uniform multilamellar structures with an average size, polydispersity index, and encapsulation efficiency similar to that of particles containing commercially available control linear mRNA modified with 5moU.

[1301] Purified hEpo circRNA displayed greater expression than 5moU-mRNA when encapsulated in LNPs and added to HEK293 cells. Expression stability from LNP-RNA in HEK293 cells was similar to that of RNA delivered by transfection reagent, with the exception of a slight delay in decay for both 5moU-mRNA and circRNA. Both unmodified circRNA and 5moU-mRNA failed to activate RIG-I/IFN-β1 in vitro.

[1302] In mice, LNP-RNA was delivered by local injection into visceral adipose tissue or intravenous delivery to the liver. Serum hEpo expression from circRNA was lower but comparable with that from 5moU-mRNA 6 hours after delivery in both cases. Serum hEpo detected after adipose injection of unmodified LNP-circRNA decayed more slowly than that from LNP-5moU-mRNA, with a delay in expression decay present in serum that was similar to that noted in vitro, but serum hEpo after intravenous injection of LNP-circRNA or LNP-5moU-mRNA decayed at approximately the same rate. There was no increase in serum cytokines or local RIG-I, TNF, or IL-6 transcript induction in any of these cases.

### Example 8

### Example 8A: Expression and Functional Stability by IRES in HEK293, HepG2, and 1C1C7 Cells

[1303] Constructs including Anabaena intron/exon regions, a Gaussia luciferase expression sequence, and varying IRES were circularized. 100 ng of each circularization reaction was separately transfected into 20,000 HEK293 cells, HepG2 cells, and 1C1C7 cells using Lipofectamine MessengerMax. Luminescence in each supernatant was assessed after 24 hours as a measure of protein expression. In HEK293 cells, constructs including Crohivirus B, Salivirus FHB, Aichi Virus, Salivirus HG-J1, and Enterovirus J IRES produced the most luminescence at 24 hours (FIG. 1A). In HepG2 cells, constructs including Aichi Virus, Salivirus FHB, EMCV-Cf, and CVA3 IRES produced high luminescence at 24 hours (FIG. 1B). In 1C1C7 cells, constructs including Salivirus FHB, Aichi Virus, Salivirus NG-J1, and Salivirus A SZ-1 IRES produced high luminescence at 24 hours (FIG. 1C).

[1304] A trend of larger IRES producing greater luminescence at 24 hours was observed. Shorter total sequence length tends to increase circularization efficiency, so selecting a high expression and relatively short IRES may result in an improved construct. In HEK293 cells, a construct using the Crohivirus B IRES produced the highest luminescence, especially in comparison to other IRES of similar length (FIG. 2A). Expression from IRES constructs in HepG2 and 1C1C7 cells plotted against IRES size are in FIGS. 2B and 2C.

[1305] Functional stability of select IRES constructs in HepG2 and 1C1C7 cells were measured over 3 days. Luminescence from secreted Gaussia luciferase in supernatant was measured every 24 hours after transfection of 20,000 cells with 100 ng of each circularization reaction, followed by complete media replacement. Salivirus A GUT and Salivirus FHB exhibited the highest functional stability in HepG2 cells, and Salivirus N-J1 and Salivirus FHB produced the most stable expression in 1C1C7 cells (FIGS. 3A and 3B).

### Example 8B: Screening of Additional IRES

[1306] Functional stability of additional IRES constructs in HEK293 cells were measured. Briefily, 5′ untranslated regions (UTRs) of interest were identified from GenBank. Selected UTRs UTRs were truncated to 675 nt from the 5′ end and inserted into a circular RNA backbone construct encoding Gaussia Luciferase (Gluc) and in front of the Gluc coding region. The circular RNAs were transfected into HEK293 cells. After 24 hours, the supernatants were collected and the luminescence from secreted Gluc protein was measured using commercially available reagents. The results are depicted in FIGS. 1D and 1E and Table 30, suggesting that many natural IRES sequences enhance the protein expression in a circular RNA context.

TABLE 30

| SEQ | | |
|---|---|---|
| ID NO | IRES | Expression |
| 413 | RhPV | 1.10E+05 |
| 414 | Halastavi arva (1x mut) | 9.46E+04 |
| 415 | Oscivirus | 4.55E+07 |
| 416 | Cadicivirus B | 2.10E+05 |
| 417 | PSIV (2x mut for Xbal) | 9.70E+04 |
| 418 | PSIV IGR | 1.01E+05 |
| 419 | PV Mahoney | 1.09E+05 |
| 420 | REV A | 9.44E+04 |
| 421 | Tropivirus A | 9.52E+04 |
| 422 | Symapivirus A | 1.27E+05 |
| 423 | Sakobuvirus A FFUP1 (1x mut) | 8.82E+06 |
| 424 | Rosavirus C NFSM6F | 6.84E+05 |
| 425 | Rosavirus 2 GA7403 | 5.05E+06 |
| 426 | Rhimavirus A | 8.42E+05 |
| 427 | Rafivirus LPXYC222841 | 2.22E+05 |
| 428 | Rafivirus WHWGGF74766 | 4.53E+06 |
| 429 | Poecivirus BCCH-449 | 3.43E+05 |
| 430 | Megirivirus A LY | 1.80E+06 |
| 431 | Megirivirus E | 1.10E+07 |
| 432 | Megirivirus C | 1.24E+05 |
| 433 | Ludopivirus | 1.05E+05 |
| 434 | Livupivirus | 2.10E+05 |
| 435 | Aichivirus A FSS693 | 6.25E+07 |
| 436 | Aichivirus KVGH | 1.72E+07 |
| 437 | Aichivirus DV | 7.79E+07 |
| 438 | Murine Kobuvirus 1 | 1.60E+07 |
| 439 | Porcine Kobuvirus K-30 | N/A |
| 440 | Porcine Kobuvirus XX | 1.32E+07 |
| 441 | Caprine Kobuvirus 12Q108 | 2.87E+08 |
| 442 | Rabbit Kobuvirus | 3.73E+07 |
| 443 | Aalivirus | 2.65E+05 |
| 444 | Grusopivirus A | 1.09E+05 |
| 445 | Grusopivirus B | 2.12E+05 |
| 446 | Yancheng osbecks grenadier anchovy | 1.57E+06 |
| | picornavirus | |
| 447 | Turkey Gallivirus M176 | 4.37E+05 |
| 448 | Falcovirus A1 | 1.48E+05 |
| 449 | Tremovirus B | 1.31E+05 |
| 450 | Didelphis aurita HAV | 1.38E+05 |
| 451 | Hepatovirus G1 | 1.41E+05 |
| 452 | Hepatovirus D | 1.47E+06 |
| 453 | Hepatovirus H2 | 1.08E+05 |
| 454 | Hepatovirus I | 8.79E+05 |
| 455 | Hepatovirus C | 5.08E+05 |
| 456 | Fipivirus A | 2.69E+05 |
| 457 | Fipivirus C | 1.09E+05 |
| 458 | Fipivirus E | 1.10E+05 |
| 459 | Aquamavirus | 4.51E+06 |
| 460 | Avisivirus A | 1.91E+05 |
| 461 | Avisivirus B | 8.68E+04 |
| 462 | Crohivirus A | 9.96E+04 |
| 463 | Kunsagivirus B | 8.01E+04 |
| 464 | Limnipivirus A | 8.30E+04 |
| 465 | Limnipivirus C | 1.35E+05 |
| 466 | Orivirus | 6.09E+05 |
| 467 | HAV FH1 | 1.24E+05 |
| 468 | HAV HM175 | 4.96E+05 |
| 469 | Parechovirus F | 6.56E+05 |
| 470 | Parechovirus D | 3.10E+05 |
| 471 | Parechovirus C | 1.24E+06 |
| 472 | Ljungan Virus 87-012 | 2.00E+06 |
| 473 | Parechovirus A2 | 1.80E+07 |
| 474 | Parechovirus A3 | 3.58E+06 |
| 475 | Parechovirus A8 | 1.61E+07 |
| 476 | Parechovirus A17 | 1.20E+06 |
| 477 | Potamipivirus A | 8.43E+05 |
| 478 | Potamipivirus B | 7.20E+05 |
| 479 | Beihai Conger Picornavirus | 1.15E+06 |
| 480 | Porcine Sapelovirus JD2011 | N/A |
| 481 | Porcine Sapelovirus A2 | 4.34E+06 |
| 482 | Simian Sapelovirus 1 | 6.55E+07 |
| 483 | Simian Sapelovirus 2 | 4.24E+07 |
| 484 | Rabovirus C | 2.49E+06 |
| 485 | Rabovirus A NYC-B10 | 1.24E+06 |
| 486 | Parabovirus C | 1.83E+07 |
| 487 | Parabovirus B | 7.85E+06 |
| 488 | Parabovirus A3 | 2.44E+08 |
| 489 | Felipivirus 127F | 8.92E+06 |
| 490 | Boosepivirus A | 7.07E+07 |
| 491 | Boosepivirus B | 1.17E+08 |
| 492 | Phacovirus Pf-CHK1 | 5.87E+06 |
| 493 | HRVC3 QPM | 1.64E+07 |
| 494 | HRVB27 | 2.04E+08 |
| 495 | HRVA73 | 1.08E+08 |
| 496 | EV L | 6.49E+07 |
| 497 | EV K | 7.52E+07 |
| 498 | EV J 1631 | 9.88E+07 |
| 499 | EV JN125 | 2.90E+07 |
| 500 | EV I | 1.31E+08 |
| 501 | EV F1 BEV 261 | 1.12E+07 |
| 502 | EV D94 | 9.25E+07 |
| 503 | PV3 | 1.25E+08 |
| 504 | EV C102 | 8.85E+07 |
| 505 | EV 30 | 5.48E+06 |
| 506 | SA5 | 1.61E+08 |
| 507 | EV A114 | 1.50E+08 |
| 508 | Mobovirus A | 3.44E+06 |
| 509 | Burpengary Virus | 1.09E+07 |
| 510 | Hunnivirus A1 | 1.61E+06 |
| 511 | Hunnivirus A2 | 6.38E+06 |
| 512 | Ia Io | 1.35E+06 |
| 513 | Taura Syndrome Virus | 8.30E+05 |
| 514 | ABPV | 6.48E+05 |
| 515 | BRAV-2 | 3.98E+06 |
| 516 | BRBV-1 | 3.34E+06 |
| 517 | ERAV-1 U188 | N/A |
| 518 | GFTV | 1.23E+06 |
| 519 | SAFV V13C | 9.32E+07 |
| 520 | SAV P-113 | 4.37E+07 |
| 521 | VHEV | 1.74E+08 |
| 522 | TRV NGS910 | 3.84E+07 |
| 523 | EMCV2 RD1338 | 1.97E+06 |
| 524 | EMCV1 JZ1203 | N/A |
| 525 | EMCV1 AnrB-3741 | 2.55E+06 |
| 526 | Cosavirus D1 | 2.11E+06 |
| 527 | Cosavirus B1 | 1.91E+06 |
| 528 | Cosavirus A SH1 | 2.16E+06 |
| 529 | Malagasivirus B | 5.05E+06 |
| 530 | Mosavirus A2 SZAL6 | 8.27E+06 |
| 531 | SVV | 1.06E+06 |
| 532 | PTV A | 7.29E+05 |
| 533 | PTV B | 6.02E+06 |
| 534 | Tottorivirus | 2.76E+07 |
| 535 | Posavirus 1 | 1.55E+06 |
| 536 | A105-675 | 2.18E+07 |
| 537 | A110-675 | 1.24E+08 |
| 538 | 18-675 | 6.04E+07 |
| 539 | A115-675 | 5.93E+07 |
| 540 | A73-675 | 1.30E+08 |
| 541 | Kobuvirus 16317 | 2.03E+07 |
| 542 | Aichivirus Chshc7 | 1.87E+07 |
| 543 | Aichivirus Goiania | 1.66E+07 |
| 544 | Aichivirus ETHP4 | 1.78E+07 |
| 545 | Aichivirus DVI2169 | 2.98E+06 |
| 546 | Aichivirus DVI2321 | 6.63E+07 |
| 547 | Aichivirus rat08 | 3.51E+07 |
| 548 | Aichivirus Rt386 | 5.71E+07 |
| 549 | Norway Rat Pestivirus | N/A |
| 550 | Porcine Kobuvirus GS2 | 44200000 |
| 551 | Kobuvirus SZAL6 | 98850000 |
| 552 | Kobuvirus sheep TB3 | N/A |
| 553 | Pronghorn antelope pestivirus | 1.35E+06 |
| 554 | Porcine pestivirus isolate Bungowannah | 1.10E+07 |
| 555 | Porcine pestivirus 1 | 9.46E+04 |
| 556 | Pestivirus giraffe-1 | 4.72E+05 |
| 557 | Classical swine fever virus | 3.16E+05 |
| 558 | Human pegivirus isolate JD2B1I | 6.85E+05 |
| 559 | Human pegivirus isolate GBV-C-ZJ | N/A |
| 560 | Human pegivirus isolate JD2B8C | 5.36E+05 |
| 561 | Hepatitis GB virus A | N/A |
| 562 | Simian pegivirus | 8.56E+04 |
| 563 | Pegivirus I | 8.02E+04 |
| 564 | Pegivirus K | 8.07E+04 |
| 565 | Theiler's disease-associated virus | 7.84E+04 |
| 566 | Rodent pegivirus | 1.79E+05 |
| 567 | Human pegivirus 2 | 3.14E+05 |
| 568 | GB virus C/Hepatitis G virus | 1.36E+05 |
| 569 | Equine Pegivirus 1 | 8.80E+04 |
| 570 | Culex theileri flavivirus | 8.52E+04 |
| 571 | Bussuquara virus | 8.20E+04 |
| 572 | Zika Virus | 8.61E+04 |
| 573 | Yokose virus | 8.55E+04 |
| 574 | Wesselsbron virus | N/A |
| 575 | Equine hepacivirus | 8.40E+04 |
| 576 | Hepacivirus B | 8.84E+04 |
| 577 | Hepacivirus I | 7.50E+04 |
| 578 | Hepacivirus J | 7.65E+04 |
| 579 | Hepacivirus K | 8.91E+04 |
| 580 | Icavirus | 4.41E+06 |
| 581 | Antarctic penguin virus A | 8.42E+04 |
| 582 | Forest pouched giant rat arterivirus | N/A |
| 583 | Avisivirus Pf-CHK1 | 1.19E+05 |
| 584 | Avian paramyxovirus penguin | 9.91E+04 |
| 585 | Newcastle disease virus | 8.86E+04 |
| 586 | Bat Hp-betacoronavirus | 8.47E+04 |
| 587 | Basella alba endornavirus | 7.65E+04 |
| 588 | Ball python nidovirus | 8.25E+04 |
| 589 | Bat sapelovirus | 8.05E+04 |
| 590 | Bat Picornavirus 3 | N/A |
| 591 | Bat Picornavirus 2 | 7.99E+07 |
| 592 | Bat Picornavirus 1 | 1.85E+07 |
| 593 | Bat Iflavirus | 9.76E+04 |
| 594 | Bat dicibavirus | 7.43E+04 |
| 595 | Betacoronavirus HKU24 | 8.96E+04 |
| 596 | Betacoronavirus England 1 | 8.74E+04 |
| 597 | Boone cardiovirus 1 | 2.62E+06 |
| 598 | Breda virus | 1.16E+05 |
| 599 | Bovine viral diarrhea virus 3 | 2.70E+06 |
| 600 | Bovine rhinitis A virus | 3.62E+06 |
| 601 | Bovine picornavirus isolate TCH6 | 1.21E+05 |
| 602 | Bovine nidovirus TCH5 | 1.17E+05 |
| 603 | Bovine hepacivirus | 1.89E+05 |
| 604 | Botrytis cinerea mitovirus 4 RdRp | 9.68E+04 |
| 605 | Botrytis cinerea mitovirus 2 RdRp | 8.73E+04 |
| 606 | Canine picodicistrovirus strain 209 | 2.79E+06 |
| 607 | Canine distemper virus | 3.02E+05 |
| 608 | Canine kobuvirus | 1.48E+08 |
| 609 | Camel alphacoronavirus | 2.48E+05 |
| 610 | Cripavirus | 1.95E+05 |
| 611 | Human coxsackievirus A2 | 7.75E+07 |
| 612 | Coronavirus AcCoV-JC34 | 1.82E+05 |
| 613 | Chicken picornavirus 3 | 9.13E+04 |
| 614 | Chicken picornavirus 1 | 1.21E+05 |
| 615 | Chicken orivirus 1 | 3.16E+05 |
| 616 | Chicken gallivirus 1 | 1.51E+07 |
| 617 | Chicken calicivirus | 1.28E+05 |
| 618 | Carp picornavirus 1 | 1.13E+05 |
| 619 | Falcon picornavirus | 3.08E+06 |
| 620 | Equine rhinitis B virus 1 | 1.01E+05 |
| 621 | Equine rhinitis A virus | 3.73E+05 |
| 622 | Equine arteritis virus | 1.89E+05 |
| 623 | Enterovirus sp. isolate CPML | 6.83E+07 |
| 624 | Enterovirus AN12 | 3.87E+06 |
| 625 | Dolphin morbillivirus | 1.22E+05 |
| 626 | Dianke virus | 1.35E+05 |
| 627 | Guereza hepacivirus | 1.38E+05 |
| 628 | Grapevine associated narnavirus-1 | 1.30E+05 |
| 629 | Goat torovirus | 1.19E+05 |
| 630 | Foot-and-mouth disease virus O isolate | 1.12E+05 |
| 631 | Feline infectious peritonitis virus | 1.35E+05 |
| 632 | Farmington virus | 1.22E+05 |
| 633 | Avian infectious bronchitis virus | 2.84E+05 |
| 634 | Human rhinovirus 1 | 7.40E+07 |
| 635 | EV22 | 1.95E+07 |
| 636 | Human TMEV-like cardiovirus | 4.48E+07 |
| 637 | Human coronavirus 229E | N/A |
| 638 | Hubei zhaovirus-like virus 1 | 1.03E+05 |
| 639 | Hubei tombus-like virus 9 | 9.28E+04 |
| 640 | Hubei tombus-like virus 32 | 9.23E+04 |
| 641 | Hubei sobemo-like virus 3 | 1.17E+05 |
| 642 | Hubei picorna-like virus 2 | 1.95E+05 |
| 643 | Hepacivirus P | 6.04E+05 |
| 644 | Harrier picornavirus 1 | 1.47E+05 |
| 645 | Kunsagivirus 1 | 4.15E+05 |
| 646 | Kagoshima-2-24-KoV | 9.30E+07 |
| 647 | Kashmir bee virus | 1.65E+05 |
| 648 | Jingmen picorna-like virus | 9.32E+04 |
| 649 | Mumps virus | 1.47E+05 |
| 650 | Mouse Mosavirus | 9.00E+04 |
| 651 | Miniopterus schreibersii picornavirus 1 | 6.05E+06 |
| 652 | Linda virus | 7.37E+05 |
| 653 | Lesavirus 2 | 3.67E+07 |
| 654 | Lesavirus 1 | 6.37E+06 |
| 655 | Phopivirus strain NewEngland | 1.06E+05 |
| 656 | Pestivirus strain Aydin | 3.11E+06 |
| 657 | Quail picornavirus QPV1 | 6.55E+07 |
| 658 | Porcine sapelovirus 1 | N/A |
| 659 | Porcine reproductive and respiratory syndrome | 1.29E+05 |
| | virus 2 | |
| 660 | Porcine enterovirus 9 | 3.20E+07 |
| 661 | Pigeon picornavirus B | 1.24E+05 |
| 662 | Picornavirus HK21 | 4.09E+05 |
| 663 | Picornavirales Tottori-HG1 | 9.54E+04 |
| 664 | Rodent hepatovirus | 1.39E+05 |
| 665 | Rinderpest virus | 4.26E+05 |
| 666 | Rabovirus A | 2.88E+06 |
| 667 | Shingleback nidovirus 1 | 2.62E+05 |
| 668 | Seneca valley virus | 1.46E+07 |
| 669 | Sclerotinia sclerotiorum dsRNA mycovirus-L | 1.69E+05 |
| 670 | Yak enterovirus | 6.19E+06 |
| 671 | Wobbly possum disease virus | 2.60E+05 |
| 672 | Avian orthoreovirus segment S1 | 4.37E+05 |
| 673 | Caprine Kobuvirus d10 | 2.20E+08 |
| 674 | Caprine Kobuvirus d20 | 2.00E+08 |
| 675 | Caprine Kobuvirus d30 | 1.87E+08 |
| 676 | Caprine Kobuvirus d40 | 2.15E+08 |
| 677 | Caprine Kobuvirus d50 | 9.65E+07 |
| 678 | Picornavirales sp. isolate RtMruf-Pico V | 2.26E+08 |
| 679 | Apodemus agrarius picornavirus strain | 1.90E+08 |
| | Longquan-Aa118 | |
| 680 | Niviventer confucianus picornavirus | 6.10E+07 |
| 681 | Bat picornavirus isolate BtRs-Pico V | 1.13E+06 |
| 682 | Rhinolophus picornavirus strain Guizhou-Rr100 | N/A |
| 683 | Rhinolophus picornavirus strain Henan-Rf265 | 3.85E+05 |
| 684 | Human enterovirus C105 | 5.49E+05 |
| 685 | Human poliovirus 1 strain NIE1116623 | 3.94E+05 |
| 686 | Human enterovirus 109 | 4.92E+05 |
| 687 | Human poliovirus 2 strain NIE0811460 | 2.59E+07 |
| 688 | Bovine picornavirus | 3.82E+06 |
| 689 | Human poliovirus 1 strain EQG1419328 | 2.44E+05 |
| 690 | Human poliovirus 2 isolate IS_061 | 5.84E+06 |
| 691 | Coxsackievirus B5 | N/A |
| 692 | Coxsackievirus A10 | N/A |

### Example 9

### Expression and Functional Stability by IRES in Jurkat Cells

[1307] 2 sets of constructs including Anabaena intron/exon regions, a Gaussia luciferase expression sequence, and a subset of previously tested IRES were circularized. 60,000 Jurkat cells were electroporated with 1 μg of each circularization reaction. Luminescence from secreted Gaussia luciferase in supernatant was measured 24 hours after electroporation. A CVB3 IRES construct was included in both sets for comparison between sets and to previously defined IRES efficacy. CVB1 and Salivirus A SZ1 IRES constructs produced the most expression at 24 h. Data can be found in FIGS. 4A and 4B.

[1308] Functional stability of the IRES constructs in each round of electroporated Jurkat cells was measured over 3 days. Luminescence from secreted Gaussia luciferase in supernatant was measured every 24 hours after electroporation of 60,000 cells with 1 μg of each circularization reaction, followed by complete media replacement (FIGS. 5A and 5B).

[1309] Salivirus A SZ1 and Salivirus A BN2 IRES constructs had high functional stability compared to other constructs.

### Example 10

### Expression, Functional Stability, and Cytokine Release of Circular and Linear RNA in Jurkat Cells

[1310] A construct including Anabaena intron/exon regions, a Gaussia luciferase expression sequence, and a Salivirus FHB IRES was circularized. mRNA including a Gaussia luciferase expression sequence and a ˜150 nt polyA tail, and modified to replace 100% of uridine with 5-methoxy uridine (5moU) is commercially available and was purchased from Trilink. 5moU nucleotide modifications have been shown to improve mRNA stability and expression (Bioconjug Chem. 2016 Mar. 16; 27(3):849-53). Expression of modified mRNA, circularization reactions (unpure), and circRNA purified by size exclusion HPLC (pure) in Jurkat cells were measured and compared (FIG. 6A). Luminescence from secreted Gaussia luciferase in supernatant was measured 24 hours after electroporation of 60,000 cells with 1 μg of each RNA species.

[1311] Luminescence from secreted Gaussia luciferase in supernatant was measured every 24 hours after electroporation of 60,000 cells with 1 ug of each RNA species, followed by complete media replacement. A comparison of functional stability data of modified mRNA and circRNA in Jurkat cells over 3 days is in FIG. 6B.

[1312] IFNγ (FIG. 7A), IL-6 (FIG. 7B), IL-2 (FIG. 7C), RIG-I (FIG. 7D), IFN-β1 (FIG. 7E), and TNFα (FIG. 7F) transcript induction was measured 18 hours after electroporation of 60,000 Jurkat cells with 1 μg of each RNA species described above and 3p-hpRNA (5′ triphosphate hairpin RNA, which is a known RIG-I agonist).

### Example 11

### Expression of Circular and Linear RNA in Monocytes and Macrophages

[1313] A construct including Anabaena intron/exon regions, a Gaussia luciferase expression sequence, and a Salivirus FHB IRES was circularized. mRNA including a Gaussia luciferase expression sequence and a ˜150 nt polyA tail, and modified to replace 100% of uridine with 5-methoxy uridine (5moU) was purchased from Trilink. Expression of circular and modified mRNA was measured in human primary monocytes (FIG. 8A) and human primary macrophages (FIG. 8B). Luminescence from secreted Gaussia luciferase in supernatant was measured 24 hours after electroporation of 60,000 cells with 1 μg of each RNA species. Luminescence was also measured 4 days after electroporation of human primary macrophages with media changes every 24 hours (FIG. 8C). The results can be found in FIG. 8. The difference in luminescence was statistically significant in each case (p<0.05).

### Example 12

### Expression and Functional Stability by IRES in Primary T Cells

[1314] Constructs including Anabaena intron/exon regions, a Gaussia luciferase expression sequence, and a subset of previously tested IRES were circularized and reaction products were purified by size exclusion HPLC. 150,000 primary human CD3+ T cells were electroporated with 1 μg of each circRNA. Luminescence from secreted Gaussia luciferase in supernatant was measured 24 hours after electroporation (FIG. 9A). Aichi Virus and CVB3 IRES constructs had the most expression at 24 hours.

[1315] Luminescence was also measured every 24 hours after electroporation for 3 days in order to compare functional stability of each construct (FIG. 9B). The construct with a Salivirus A SZ1 IRES was the most stable.

### Example 13

### Expression and Functional Stability of Circular and Linear RNA in Primary T Cells and PBMCs

[1316] Constructs including Anabaena intron/exon regions, a Gaussia luciferase expression sequence, and a Salivirus A SZ1 IRES or Salivirus FHB IRES were circularized. mRNA including a Gaussia luciferase expression sequence and a ˜150 nt polyA tail, and modified to replace 100% of uridine with 5-methoxy uridine (5moU) and was purchased from Trilink. Expression of Salivirus A SZ1 IRES HPLC purified circular and modified mRNA was measured in human primary CD3+ T cells. Expression of Salivirus FHB HPLC purified circular, unpurified circular and modified mRNA was measured in human PBMCs. Luminescence from secreted Gaussia luciferase in supernatant was measured 24 hours after electroporation of 150,000 cells with 1 μg of each RNA species. Data for primary human T cells is shown in FIGS. 10A and 10B, and data for PBMCs is shown in FIG. 10C. The difference in expression between the purified circular RNA and unpurified circular RNA or linear RNA was significant in each case (p<0.05).

[1317] Luminescence from secreted Gaussia luciferase in primary T cell supernatant was measured every 24 hours after electroporation over 3 days in order to compare construct functional stability. Data is shown in FIG. 10B. The difference in relative luminescence from the day 1 measurement between purified circular RNA and linear RNA was significant at both day 2 and day 3 for primary T cells.

### Example 14

### Circularization Efficiency by Permutation Site in Anabaena Intron

[1318] RNA constructs including a CVB3 IRES, a Gaussia luciferase expression sequence, Anabaena intron/exon regions, spacers, internal homology regions, and homology arms were produced. Circularization efficiency of constructs using the traditional Anabaena intron permutation site and 5 consecutive permutations sites in P9 was measured by HPLC. HPLC chromatograms for the 5 consecutive permutation sites in P9 are shown in FIG. 11A.

[1319] Circularization efficiency was measured at a variety of permutation sites. Circularization efficiency is defined as the area under the HPLC chromatogram curve for each of: circRNA/(circRNA+precursor RNA). Ranked quantification of circularization efficiency at each permutation site is in FIG. 11B. 3 permutation sites (indicated in FIG. 11B) were selected for further investigation.

[1320] Circular RNA in this example was circularized by in vitro transcription (IVT) then purified via spin column. Circularization efficiency for all constructs would likely be higher if the additional step of incubation with Mg2+ and guanosine nucleotide were included; however, removing this step allowed for comparison between, and optimization of, circular RNA constructs. This level of optimization is especially useful for maintaining high circularization efficiency with large RNA constructs, such as those encoding chimeric antigen receptors.

### Example 15

### Circularization Efficiency of Alternative Introns

[1321] Precursor RNA containing a permuted group 1 intron of variable species origin or permutation site and several constant elements including: a CVB3 IRES, a Gaussia luciferase expression sequence, spacers, internal homology regions, and homology arms were created. Circularization data can be found in FIG. 12. FIG. 12A shows chromatograms resolving precursor, CircRNA and introns. FIG. 12B provides ranked quantification of circularization efficiency, based on the chromatograms shown in FIG. 12A, as a function of intron construct.

[1322] Circular RNA in this example was circularized by in vitro transcription (IVT) then spin column purification. Circularization efficiency for all constructs would likely be higher if the additional step of incubation with Mg2+ and guanosine nucleotide were included; however, removing this step allows for comparison between, and optimization of, circular RNA constructs. This level of optimization is especially useful for maintaining high circularization efficiency with large RNA constructs, such as those encoding chimeric antigen receptors.

### Example 16

### Circularization Efficiency by Homology Arm Presence or Length

[1323] RNA constructs including a CVB3 IRES, a Gaussia luciferase expression sequence, Anabaena intron/exon regions, spacers, and internal homology regions were produced. Constructs representing 3 Anabaena intron permutation sites were tested with 30 nt, 25% GC homology arms or without homology arms (“NA”). These constructs were allowed to circularize without an Mg²⁺ incubation step. Circularization efficiency was measured and compared. Data can be found in FIGS. 13A and 13B. Circularization efficiency was higher for each construct lacking homology arms. FIG. 13A provides ranked quantification of circularization efficiency; FIG. 13B provides chromatograms resolving precursor, circRNA and introns.

[1324] For each of the 3 permutation sites, constructs were created with 10 nt, 20 nt, and 30 nt arm lengths and 25%, 50%, and 75% GC content. Splicing efficiency of these constructs was measured and compared to constructs without homology arms (FIG. 14). Splicing efficiency is defined as the proportion of free introns relative to the total RNA in the splicing reaction.

[1325] FIG. 15 A (left) shows HPLC chromatograms indicating the contribution of strong homology arms to improved splicing efficiency. Top left: 75% GC content, 10 nt homology arms. Center left: 75% GC content, 20 nt homology arms. Bottom left: 75% GC content, 30 nt homology arms.

[1326] FIG. 15 A (right) shows HPLC chromatograms showing increased splicing efficiency paired with increased nicking, appearing as a shoulder on the circRNA peak. Top right: 75% GC content, 10 nt homology arms. Center right: 75% GC content, 20 nt homology arms. Bottom right: 75% GC content, 30 nt homology arms.

[1327] FIG. 15 B (left) shows select combinations of permutation sites and homology arms hypothesized to demonstrate improved circularization efficiency.

[1328] FIG. 15 B (right) shows select combinations of permutation sites and homology arms hypothesized to demonstrate improved circularization efficiency, treated with E. coli polyA polymerase.

[1329] Circular RNA in this example was circularized by in vitro transcription (IVT) then spin-column purified. Circularization efficiency for all constructs would likely be higher if an additional Mg2+ incubation step with guanosine nucleotide were included; however, removing this step allowed for comparison between, and optimization of, circular RNA constructs. This level of optimization is especially useful for maintaining high circularization efficiency with large RNA constructs, such as those encoding chimeric antigen receptors.

### Example 17

### Circular RNA Encoding Chimeric Antigen Receptors

[1330] Constructs including Anabaena intron/exon regions, a Kymriah chimeric antigen receptors (CAR) expression sequence, and a CVB3 IRES were circularized. 100,000 human primary CD3+ T cells were electroporated with 500 ng of circRNA and co-cultured for 24 hours with Raji cells stably expressing GFP and firefly luciferase. Effector to target ratio (E:T ratio) 0.75:1. 100,000 human primary CD3+ T cells were mock electroporated and co-cultured as a control (FIG. 16).

[1331] Sets of 100,000 human primary CD3+ T cells were mock electroporated or electroporated with 1 μg of circRNA then co-cultured for 48 hours with Raji cells stably expressing GFP and firefly luciferase E:T ratio 10:1 (FIG. 17).

[1332] Quantification of specific lysis of Raji target cells was determined by detection of firefly luminescence (FIG. 18). 100,000 human primary CD3+ T cells either mock electroporated or electroporated with circRNA encoding different CAR sequences were co-cultured for 48 hours with Raji cells stably expressing GFP and firefly luciferase. % Specific lysis defined as 1-[CAR condition luminescence]/[mock condition luminescence]. E:T ratio 10:1.

### Example 18

### Expression and Functional Stability of Circular and Linear RNA in Jurkat Cells and Resting Human T Cells

[1333] Constructs including Anabaena intron/exon regions, a Gaussia luciferase expression sequence, and a subset of previously tested IRES were circularized and reaction products were purified by size exclusion HPLC. 150,000 Jurkat cells were electroporated with 1 μg of circular RNA or 5moU-mRNA. Luminescence from secreted Gaussia luciferase in supernatant was measured 24 hours after electroporation (FIG. 19A left). 150,000 resting primary human CD3+ T cells (10 days post-stimulation) were electroporated with 1 μg of circular RNA or 5moU-mRNA. Luminescence from secreted Gaussia luciferase in supernatant was measured 24 hours after electroporation (FIG. 19A right).

[1334] Luminescence from secreted Gaussia luciferase in supernatant was measured every 24 hours after electroporation, followed by complete media replacement. Functional stability data shown in FIG. 19B. Circular RNA had more functional stability than linear RNA in each case, with a more pronounced difference in Jurkat cells.

### Example 19

### IFN-β1, RIG-I, IL-2, IL-6, IFNγ, and TNFα Transcript Induction of Cells Electroporated with Linear RNA or Varying Circular RNA Constructs

[1335] Constructs including Anabaena intron/exon regions, a Gaussia luciferase expression sequence, and a subset of previously tested IRES were circularized and reaction products were purified by size exclusion HPLC. 150,000 CD3+ human T cells were electroporated with 1 μg of circular RNA, 5moU-mRNA, or immunostimulatory positive control poly inosine:cytosine. IFN-β1 (FIG. 20A), RIG-I (FIG. 20B), IL-2 (FIG. 20C), IL-6 (FIG. 20D), IFNγ (FIG. 20E), and TNFα (FIG. 20F) transcript induction was measured 18 hours after electroporation.

### Example 20

### Specific Lysis of Target Cells and IFNγ Transcript Induction by CAR Expressing Cells Electroporated with Different Amounts of Circular or Linear RNA; Specific Lysis of Target and Non-Target Cells by CAR Expressing Cells at Different E:T Ratios

[1336] Constructs including Anabaena intron/exon regions, an anti-CD19 CAR expression sequence, and a CVB3 IRES were circularized and reaction products were purified by size exclusion HPLC. 150,000 human primary CD3+ T cells either mock electroporated or electroporated with different quantities of circRNA encoding an anti-CD19 CAR sequence were co-cultured for 12 hours with Raji cells stably expressing GFP and firefly luciferase at an E:T ratio of 2:1. Specific lysis of Raji target cells was determined by detection of firefly luminescence (FIG. 21A). % Specific lysis was defined as 1-[CAR condition luminescence]/[mock condition luminescence]. IFNγ transcript induction was measured 24 hours after electroporation (FIG. 21B).

[1337] 150,000 human primary CD3+ T cells were either mock electroporated or electroporated with 500 ng circRNA or m1ψ-mRNA encoding an anti-CD19 CAR sequence, then co-cultured for 24 hours with Raji cells stably expressing firefly luciferase at different E:T ratios. % Specific lysis of Raji target cells was determined by detection of firefly luminescence (FIG. 22A). % Specific lysis was defined as 1-[CAR condition luminescence]/[mock condition luminescence].

[1338] CAR expressing T cells were also co-cultured for 24 hours with Raji or K562 cells stably expressing firefly luciferase at different E:T ratios. Specific lysis of Raji target cells or K562 non-target cells was determined by detection of firefly luminescence (FIG. 22B). % Specific lysis is defined as 1-[CAR condition luminescence]/[mock condition luminescence].

### Example 21

### Specific Lysis of Target Cells by T Cells Electroporated with Circular RNA or Linear RNA Encoding a CAR

[1339] Constructs including Anabaena intron/exon regions, an anti-CD19 CAR expression sequence, and a CVB3 IRES were circularized and reaction products were purified by size exclusion HPLC. Human primary CD3+ T cells were electroporated with 500 ng of circular RNA or an equimolar quantity of m1ψ-mRNA, each encoding a CD19-targeted CAR. Raji cells were added to CAR-T cell cultures over 7 days at an E:T ratio of 10:1. % Specific lysis was measured for both constructs at 1, 3, 5, and 7 days (FIG. 23).

### Example 22

### Specific Lysis of Raji Cells by T Cells Expressing an Anti-CD19 CAR or an Anti-BCMA CAR

[1340] Constructs including Anabaena intron/exon regions, anti-CD19 or anti-BCMA CAR expression sequence, and a CVB3 IRES were circularized and reaction products were purified by size exclusion HPLC. 150,000 primary human CD3+ T cells were electroporated with 500 ng of circRNA, then were co-cultured with Raji cells at an E:T ratio of 2:1. % Specific lysis was measured 12 hours after electroporation (FIG. 24).

### Example 23

### Example 23A: Synthesis of Compounds

[1341] Synthesis of representative ionizable lipids of the invention are described in PCT applications PCT/US2016/052352, PCT/US2016/068300, PCT/US2010/061058, PCT/US2018/058555, PCT/US2018/053569, PCT/US2017/028981, PCT/US2019/025246, PCT/US2018/035419, PCT/US2019/015913, and US applications with publication numbers 20190314524, 20190321489, and 20190314284, the contents of each of which are incorporated herein by reference in their entireties.

### Example 23B: Synthesis of Compounds

[1342] Synthesis of representative ionizable lipids of the invention are described in US patent publication number US20170210697A1, the contents of which is incorporated herein by reference in its entirety.

### Example 24

### Protein Expression by Organ

[1343] Circular or linear RNA encoding FLuc was generated and loaded into transfer vehicles with the following formulation: 50% ionizable lipid 15 in Table 10b, 10% DSPC, 1.5% PEG-DMG, 38.5% cholesterol. CD-1 mice were dosed at 0.2 mg/kg and luminescence was measured at 6 hours (live IVIS) and 24 hours (live IVIS and ex vivo IVIS). Total Flux (photons/second over a region of interest) of the liver, spleen, kidney, lung, and heart was measured (FIGS. 25 and 26).

### Example 25

### Distribution of Expression in the Spleen

[1344] Circular or linear RNA encoding GFP is generated and loaded into transfer vehicles with the following formulation: 50% ionizable lipid 15 in Table 10b, 10% DSPC, 1.5% PEG-DMG, 38.5% cholesterol. The formulation is administered to CD-1 mice. Flow cytometry is run on spleen cells to determine the distribution of expression across cell types.

### Example 26

### Production of Nanoparticle Compositions

[1345] In order to investigate safe and efficacious nanoparticle compositions for use in the delivery of circular RNA to cells, a range of formulations are prepared and tested. Specifically, the particular elements and ratios thereof in the lipid component of nanoparticle compositions are optimized.

[1346] Nanoparticles can be made in a 1 fluid stream or with mixing processes such as microfluidics and T-junction mixing of two fluid streams, one of which contains the circular RNA and the other has the lipid components.

[1347] Lipid compositions are prepared by combining an ionizable lipid, optionally a helper lipid (such as DOPE, DSPC, or oleic acid obtainable from Avanti Polar Lipids, Alabaster, AL), a PEG lipid (such as 1,2-dimyristoyl-sn-glycerol methoxypolyethylene glycol, also known as PEG-DMG, obtainable from Avanti Polar Lipids, Alabaster, AL), and a structural lipid such as cholesterol at concentrations of about, e.g., 40 or 50 mM in a solvent, e.g., ethanol. Solutions should be refrigerated for storage at, for example, −20° C. Lipids are combined to yield desired molar ratios (see, for example, Tables 31a and 31b below) and diluted with water and ethanol to a final lipid concentration of e.g., between about 5.5 mM and about 25 mM.

TABLE 31a

| Formulation | |
|---|---|
| number | Description |
| 1 | Aliquots of 50 mg/mL ethanolic solutions of C12-200, DOPE, Chol and DMG- |
| | PEG2K (40:30:25:5) are mixed and diluted with ethanol to 3 mL final volume. |
| | Separately, an aqueous buffered solution (10 mM citrate/150 mM NaCl, pH 4.5) of |
| | circRNA is prepared from a 1 mg/mL stock. The lipid solution is injected rapidly |
| | into the aqueous circRNA solution and shaken to yield a final suspension in 20% |
| | ethanol. The resulting nanoparticle suspension is filtered, diafiltrated with 1× PBS |
| | (pH 7.4), concentrated and stored at 2-8° C. |
| 2 | Aliquots of 50 mg/mL ethanolic solutions of DODAP, DOPE, cholesterol and |
| | DMG-PEG2K (18:56:20:6) are mixed and diluted with ethanol to 3 mL final |
| | volume. Separately, an aqueous buffered solution (10 mM citrate/150 mM NaCl, |
| | pH 4.5) of EPO circRNA is prepared from a 1 mg/mL stock. The lipid solution is |
| | injected rapidly into the aqueous circRNA solution and shaken to yield a final |
| | suspension in 20% ethanol. The resulting nanoparticle suspension is filtered, |
| | diafiltrated with 1× PBS (pH 7.4), concentrated and stored at 2-8° C. Final |
| | concentration = 1.35 mg/mL EPO circRNA (encapsulated). Zave = 75.9 nm |
| | (Dv(50) = 57.3 nm; Dv(90) = 92.1 nm). |
| 3 | Aliquots of 50 mg/mL ethanolic solutions of HGT4003, DOPE, cholesterol and |
| | DMG-PEG2K (50:25:20:5) are mixed and diluted with ethanol to 3 mL final |
| | volume. Separately, an aqueous buffered solution (10 mM citrate/150 mM NaCl, |
| | pH 4.5) of circRNA is prepared from a 1 mg/mL stock. The lipid solution is |
| | injected rapidly into the aqueous circRNA solution and shaken to yield a final |
| | suspension in 20% ethanol. The resulting nanoparticle suspension is filtered, |
| | diafiltrated with 1× PBS (pH 7.4), concentrated and stored at 2-8° C. |
| 4 | Aliquots of 50 mg/mL ethanolic solutions of ICE, DOPE and DMG-PEG2K |
| | (70:25:5) are mixed and diluted with ethanol to 3 mL final volume. Separately, an |
| | aqueous buffered solution (10 mM citrate/150 mM NaCl, pH 4.5) of circRNA is |
| | prepared from a 1 mg/mL stock. The lipid solution is injected rapidly into the |
| | aqueous circRNA solution and shaken to yield a final suspension in 20% ethanol. |
| | The resulting nanoparticle suspension is filtered, diafiltrated with 1× PBS (pH 7.4), |
| | concentrated and stored at 2-8° C. |
| 5 | Aliquots of 50 mg/mL ethanolic solutions of HGT5000, DOPE, cholesterol and |
| | DMG-PEG2K (40:20:35:5) are mixed and diluted with ethanol to 3 mL final |
| | volume. Separately, an aqueous buffered solution (10 mM citrate/150 mM NaCl, |
| | pH 4.5) of EPO circRNA is prepared from a 1 mg/mL stock. The lipid solution is |
| | injected rapidly into the aqueous circRNA solution and shaken to yield a final |
| | suspension in 20% ethanol. The resulting nanoparticle suspension is filtered, |
| | diafiltrated with 1× PBS (pH 7.4), concentrated and stored at 2-8° C. Final |
| | concentration = 1.82 mg/mL EPO mRNA (encapsulated). Zave = 105.6 nm |
| | (Dv(50) = 53.7 nm; Dv(90) = 157 nm). |
| 6 | Aliquots of 50 mg/mL ethanolic solutions of HGT5001, DOPE, cholesterol and |
| | DMG-PEG2K (40:20:35:5) are mixed and diluted with ethanol to 3 mL final |
| | volume. Separately, an aqueous buffered solution (10 mM citrate/150 mM NaCl, |
| | pH 4.5) of EPO circRNA is prepared from a 1 mg/mL stock. The lipid solution is |
| | injected rapidly into the aqueous circRNA solution and shaken to yield a final |
| | suspension in 20% ethanol. The resulting nanoparticle suspension is filtered, |
| | diafiltrated with 1× PBS (pH 7.4), concentrated and stored at 2-8° C. |

[1348] In some embodiments, transfer vehicle has a formulation as described in Table 31a.

TABLE 31b

| Composition (mol %) | Compone |
|---|---|
| 40:20:38.5:1.5 | Compound:Phospholipid:Phytosterol*:PEG-DMG |
| 45:15:38.5:1.5 | Compound:Phospholipid:Phytosterol*:PEG-DMG |
| 50:10:38.5:1.5 | Compound:Phospholipid:Phytosterol*:PEG-DMG |
| 55:5:38.5:1.5 | Compound:Phospholipid:Phytosterol*:PEG-DMG |
| 60:5:33.5:1.5 | Compound:Phospholipid:Phytosterol*:PEG-DMG |
| 45:20:33.5:1.5 | Compound:Phospholipid:Phytosterol*:PEG-DMG |
| 50:20:28.5:1.5 | Compound:Phospholipid:Phytosterol*:PEG-DMG |
| 55:20:23.5:1.5 | Compound:Phospholipid:Phytosterol*:PEG-DMG |
| 60:20:18.5:1.5 | Compound:Phospholipid:Phytosterol*:PEG-DMG |
| 40:15:43.5:1.5 | Compound:Phospholipid:Phytosterol*:PEG-DMG |
| 50:15:33.5:1.5 | Compound:Phospholipid:Phytosterol*:PEG-DMG |
| 55:15:28.5:1.5 | Compound:Phospholipid:Phytosterol*:PEG-DMG |
| 60:15:23.5:1.5 | Compound:Phospholipid:Phytosterol*:PEG-DMG |
| 40:10:48.5:1.5 | Compound:Phospholipid:Phytosterol*:PEG-DMG |
| 45:10:43.5:1.5 | Compound:Phospholipid:Phytosterol*:PEG-DMG |
| 55:10:33.5:1.5 | Compound:Phospholipid:Phytosterol*:PEG-DMG |
| 60:10:28.5:1.5 | Compound:Phospholipid:Phytosterol*:PEG-DMG |
| 40:5:53.5:1.5 | Compound:Phospholipid:Phytosterol*:PEG-DMG |
| 45:5:48.5:1.5 | Compound:Phospholipid:Phytosterol*:PEG-DMG |
| 50:5:43.5:1.5 | Compound:Phospholipid:Phytosterol*:PEG-DMG |
| 40:20:40:0 | Compound:Phospholipid:Phytosterol*:PEG-DMG |
| 45:20:35:0 | Compound:Phospholipid:Phytosterol*:PEG-DMG |
| 50:20:30:0 | Compound:Phospholipid:Phytosterol*:PEG-DMG |
| 55:20:25:0 | Compound:Phospholipid:Phytosterol*:PEG-DMG |
| 60:20:20:0 | Compound:Phospholipid:Phytosterol*:PEG-DMG |
| 40:15:45:0 | Compound:Phospholipid:Phytosterol*:PEG-DMG |

[1349] In some embodiments, transfer vehicle has a formulation as described in Table 31b.

[1350] For nanoparticle compositions including circRNA, solutions of the circRNA at concentrations of 0.1 mg/ml in deionized water are diluted in a buffer, e.g., 50 mM sodium citrate buffer at a pH between 3 and 4 to form a stock solution. Alternatively, solutions of the circRNA at concentrations of 0.15 mg/ml in deionized water are diluted in a buffer, e.g., 6.25 mM sodium acetate buffer at a pH between 3 and 4.5 to form a stock solution.

[1351] Nanoparticle compositions including a circular RNA and a lipid component are prepared by combining the lipid solution with a solution including the circular RNA at lipid component to circRNA wt:wt ratios between about 5:1 and about 50:1. The lipid solution is rapidly injected using, e.g., a NanoAssemblr microfluidic based system at flow rates between about 10 ml/min and about 18 ml/min or between about 5 ml/min and about 18 ml/min into the circRNA solution, to produce a suspension with a water to ethanol ratio between about 1:1 and about 4:1.

[1352] Nanoparticle compositions can be processed by dialysis to remove ethanol and achieve buffer exchange. Formulations are dialyzed twice against phosphate buffered saline (PBS), pH 7.4, at volumes 200 times that of the primary product using Slide-A-Lyzer cassettes (Thermo Fisher Scientific Inc., Rockford, IL) with a molecular weight cutoff of 10 kDa or 20 kDa. The formulations are then dialyzed overnight at 4° C. The resulting nanoparticle suspension is filtered through 0.2 μm sterile filters (Sarstedt, Nümbrecht, Germany) into glass vials and sealed with crimp closures. Nanoparticle composition solutions of 0.01 mg/ml to 0.15 mg/ml are generally obtained.

[1353] The method described above induces nano-precipitation and particle formation.

[1354] Alternative processes including, but not limited to, T-junction and direct injection, may be used to achieve the same nano-precipitation. B. Characterization of nanoparticle compositions

[1355] A Zetasizer Nano ZS (Malvern Instruments Ltd, Malvern, Worcestershire, UK) can be used to determine the particle size, the polydispersity index (PDI) and the zeta potential of the nanoparticle compositions in 1×PBS in determining particle size and 15 mM PBS in determining zeta potential.

[1356] Ultraviolet-visible spectroscopy can be used to determine the concentration of circRNA in nanoparticle compositions. 100 μL of the diluted formulation in 1×PBS is added to 900 μL of a 4:1 (v/v) mixture of methanol and chloroform. After mixing, the absorbance spectrum of the solution is recorded, for example, between 230 nm and 330 nm on a DU 800 spectrophotometer (Beckman Coulter, Beckman Coulter, Inc., Brea, CA). The concentration of circRNA in the nanoparticle composition can be calculated based on the extinction coefficient of the circRNA used in the composition and on the difference between the absorbance at a wavelength of, for example, 260 nm and the baseline value at a wavelength of, for example, 330 nm.

[1357] A QUANT-IT™ RIBOGREEN® RNA assay (Invitrogen Corporation Carlsbad, CA) can be used to evaluate the encapsulation of circRNA by the nanoparticle composition. The samples are diluted to a concentration of approximately 5 μg/mL or 1 μg/mL in a TE buffer solution (10 mM Tris-HCl, 1 mM EDTA, pH 7.5). 50 μL of the diluted samples are transferred to a polystyrene 96 well plate and either 50 μL of TE buffer or 50 μL of a 2-4% Triton X-100 solution is added to the wells. The plate is incubated at a temperature of 37° C. for 15 minutes. The RIBOGREEN® reagent is diluted 1:100 or 1:200 in TE buffer, and 100 μL of this solution is added to each well. The fluorescence intensity can be measured using a fluorescence plate reader (Wallac Victor 1420 Multilabel Counter; Perkin Elmer, Waltham, MA) at an excitation wavelength of, for example, about 480 nm and an emission wavelength of, for example, about 520 nm. The fluorescence values of the reagent blank are subtracted from that of each of the samples and the percentage of free circRNA is determined by dividing the fluorescence intensity of the intact sample (without addition of Triton X-100) by the fluorescence value of the disrupted sample (caused by the addition of Triton X-100). C.

### In Vivo Formulation Studies:

[1358] In order to monitor how effectively various nanoparticle compositions deliver circRNA to targeted cells, different nanoparticle compositions including circRNA are prepared and administered to rodent populations. Mice are intravenously, intramuscularly, intraarterially, or intratumorally administered a single dose including a nanoparticle composition with a lipid nanoparticle formulation. In some instances, mice may be made to inhale doses. Dose sizes may range from 0.001 mg/kg to 10 mg/kg, where 10 mg/kg describes a dose including 10 mg of a circRNA in a nanoparticle composition for each 1 kg of body mass of the mouse. A control composition including PBS may also be employed.

[1359] Upon administration of nanoparticle compositions to mice, dose delivery profiles, dose responses, and toxicity of particular formulations and doses thereof can be measured by enzyme-linked immunosorbent assays (ELISA), bioluminescent imaging, or other methods. Time courses of protein expression can also be evaluated. Samples collected from the rodents for evaluation may include blood and tissue (for example, muscle tissue from the site of an intramuscular injection and internal tissue); sample collection may involve sacrifice of the animals.

[1360] Higher levels of protein expression induced by administration of a composition including a circRNA will be indicative of higher circRNA translation and/or nanoparticle composition circRNA delivery efficiencies. As the non-RNA components are not thought to affect translational machineries themselves, a higher level of protein expression is likely indicative of a higher efficiency of delivery of the circRNA by a given nanoparticle composition relative to other nanoparticle compositions or the absence thereof.

### Example 27

### Characterization of Nanoparticle Compositions

[1361] A Zetasizer Nano ZS (Malvern Instruments Ltd, Malvern, Worcestershire, UK) can be used to determine the particle size, the polydispersity index (PDI) and the zeta potential of the transfer vehicle compositions in 1×PBS in determining particle size and 15 mM PBS in determining zeta potential.

[1362] Ultraviolet-visible spectroscopy can be used to determine the concentration of a therapeutic and/or prophylactic (e.g., RNA) in transfer vehicle compositions. 100 μL of the diluted formulation in 1×PBS is added to 900 μL of a 4:1 (v/v) mixture of methanol and chloroform. After mixing, the absorbance spectrum of the solution is recorded, for example, between 230 nm and 330 nm on a DU 800 spectrophotometer (Beckman Coulter, Beckman Coulter, Inc., Brea, CA). The concentration of therapeutic and/or prophylactic in the transfer vehicle composition can be calculated based on the extinction coefficient of the therapeutic and/or prophylactic used in the composition and on the difference between the absorbance at a wavelength of, for example, 260 nm and the baseline value at a wavelength of, for example, 330 nm.

[1363] For transfer vehicle compositions including RNA, a QUANT-IT™ RIBOGREEN® RNA assay (Invitrogen Corporation Carlsbad, CA) can be used to evaluate the encapsulation of RNA by the transfer vehicle composition. The samples are diluted to a concentration of approximately 5 μg/mL or 1 μg/mL in a TE buffer solution (10 mM Tris-HCl, 1 mM EDTA, pH 7.5). 50 μL of the diluted samples are transferred to a polystyrene 96 well plate and either 50 μL of TE buffer or 50 μL of a 2-4% Triton X-100 solution is added to the wells. The plate is incubated at a temperature of 37° C. for 15 minutes. The RIBOGREEN® reagent is diluted 1:100 or 1:200 in TE buffer, and 100 μL of this solution is added to each well. The fluorescence intensity can be measured using a fluorescence plate reader (Wallac Victor 1420 Multilablel Counter; Perkin Elmer, Waltham, MA) at an excitation wavelength of, for example, about 480 nm and an emission wavelength of, for example, about 520 nm. The fluorescence values of the reagent blank are

[1364] subtracted from that of each of the samples and the percentage of free RNA is determined by dividing the fluorescence intensity of the intact sample (without addition of Triton X-100) by the fluorescence value of the disrupted sample (caused by the addition of Triton X-100).

### Example 28

### T Cell Targeting

[1365] To target transfer vehicles to T-cells, T cell antigen binders, e.g., anti-CD8 antibodies, are coupled to the surface of the transfer vehicle. Anti-T cell antigen antibodies are mildly reduced with an excess of DTT in the presence of EDTA in PBS to expose free hinge region thiols. To remove DTT, antibodies are passed through a desalting column. The heterobifunctional cross-linker SM(PEG)24 is used to anchor antibodies to the surface of circRNA-loaded transfer vehicles (Amine groups are present in the head groups of PEG lipids, free thiol groups on antibodies were created by DTT, SM(PEG)24 cross-links between amines and thiol groups). Transfer vehicles are first incubated with an excess of SM(PEG)24 and centrifuged to remove unreacted cross-linker. Activated transfer vehicles are then incubated with an excess of reduced anti-T cell antigen antibody. Unbound antibody is removed using a centrifugal filtration device.

### Example 29

### RNA Containing Transfer Vehicle Using RV88

[1366] In this example RNA containing transfer vehicles are synthesized using the 2-D vortex microfluidic chip with the cationic lipid RV88 for delivery of circRNA.

[chemical structure]

TABLE 32a

| Materials and Instrument | Vendor | Cat # |
|---|---|---|
| 1M Tris-HCl, pH 8.0, Sterile | Teknova | T1080 |
| 5M Sodium Chloride solution | Teknova | S0250 |
| QB Citrate buffer, pH 6.0 | Teknova | Q2446 |
| (100 nM) | | |
| Nuclease-free water | Ambion | AM9937 |
| Triton X-100 | Sigma-Aldrich | T8787-100ML |
| RV88 | GVK bio | |
| DSPC | Lipoid | 556500 |
| Cholesterol | Sigma | C3045-5G |
| PEG2K | Avanti Polar Lipids | 880150 |
| Ethanol | Acros Organic | 615090010 |
| 5 mL Borosilicate glass vials | Thermo Scientific | ST5-20 |
| PD MiniTrap G-25 | GE Healthcare | VWR Cat. |
| Desalting Columns | | #95055-984 |
| Quant-IT RiboGreen | Molecular | R11490 |
| RNA Assay kit | Probes/Life | |
| | Technologies | |
| Black 96-well microplates | Greiner | 655900 |

[1367] RV88, DSPC, and cholesterol all being prepared in ethanol at a concentration of 10 mg/ml in borosilica vials. The lipid 14.0-PEG2K PE is prepared at a concentration of 4 mg/ml also in a borosilica glass vial. Dissolution of lipids at stock concentrations is attained by sonication of the lipids in ethanol for 2 min. The solutions are then heated on an orbital tilting shaker set at 170 rpm at 37° C. for 10 min. Vials are then equilibrated at 26° C. for a minimum of 45 min. The lipids are then mixed by adding volumes of stock lipid as shown in Table 32b. The solution is then adjusted with ethanol such that the final lipid concentration was 7.92 mg/ml.

TABLE 32b

| | | | | | Stock | | Ethanol |
|---|---|---|---|---|---|---|---|
| Composition | MW | % | nmoles | mg | (mg/ml) | ul | (ul) |
| RV88 | 794.2 | 40% | 7200 | 5.72 | 10 | 571.8 | 155.3 |
| DSPC | 790.15 | 10% | 1800 | 1.42 | 10 | 142.2 | |
| Cholesterol | 386.67 | 48% | 8640 | 3.34 | 10 | 334.1 | |
| PEG2K | 2693.3 | 2% | 360 | 0.97 | 4 | 242.4 | |

[1368] RNA is prepared as a stock solution with 75 mM Citrate buffer at pH 6.0 and a concentration of RNA at 1.250 mg/ml. The concentration of the RNA is then adjusted to 0.1037 mg/ml with 75 mM citrate buffer at pH 6.0, equilibrated to 26° C. The solution is then incubated at 26° C. for a minimum of 25 min.

[1369] The microfluidic chamber is cleaned with ethanol and neMYSIS syringe pumps are prepared by loading a syringe with the RNA solution and another syringe with the ethanolic lipid. Both syringes are loaded and under the control of neMESYS software. The solutions are then applied to the mixing chip at an aqueous to organic phase ratio of 2 and a total flow rate of 22 ml/min (14.67 ml/min for RNA and 7.33 ml/min for the lipid solution. Both pumps are started synchronously. The mixer solution that flowed from the microfluidic chip is collected in 4×1 ml fractions with the first fraction being discarded as waste. The remaining solution containing the RNA-liposomes is exchanged by using G-25 mini desalting columns to 10 mM Tris-HCl, 1 mM EDTA, at pH 7.5. Following buffer exchange, the materials are characterized for size, and RNA entrapment through DLS analysis and Ribogreen assays, respectively.

### Example 30

### RNA Containing Transfer Vehicle Using RV94

[1370] In this example, RNA containing liposome are synthesized using the 2-D vortex microfluidic chip with the cationic lipid RV94 for delivery of circRNA.

[chemical structure]

TABLE 33

| Materials and Instrument | Vendor | Cat # |
|---|---|---|
| 1M Tris-HCl, pH 8.0, Sterile | Teknova | T1080 |
| 5M Sodium Chloride solution | Teknova | S0250 |
| QB Citrate buffer, pH 6.0 | Teknova | Q2446 |
| (100 mM) | | |
| Nuclease-free water | Ambion | AM9937 |
| Triton X-100 | Sigma-Aldrich | T8787-100ML |
| RV94 | GVKbio | |
| DSPC | Lipoid | 556500 |
| Cholesterol | Sigma | C3045-5G |
| PEG2K | Avanti Polar Lipids | 880150 |
| Ethanol | Acros Organic | 615090010 |
| 5 mL Borosilicate vials | Thermo Scientific | ST5-20 |
| PD MiniTrap G-25 | GE Healthcare | VWR Cat. |
| Desalting Columns | | #95055-984 |
| Quant-IT RiboGreen | Molecular | R11490 |
| RNA Assay kit | Probes/Life | |
| | Technologies | |
| Black 96-well microplates | Greiner | 655900 |

[1371] The lipids were prepared as in Example 29 using the material amounts named in Table 34 to a final lipid concentration of 7.92 mg/ml.

TABLE 34

| | | | | | Stock | | Ethanol |
|---|---|---|---|---|---|---|---|
| Composition | MW | % | nmoles | mg | (mg/ml) | ul | (ul) |
| RV94 | 806.22 | 40% | 2880 | 2.33 | 10 | 232.6 | 155.3 |
| DSPC | 790.15 | 10% | 720 | 0.57 | 10 | 56.9 | |
| Cholesterol | 386.67 | 48% | 3456 | 1.34 | 10 | 133.6 | |
| PEG2K | 2693.3 | 2% | 144 | 0.39 | 4 | 97.0 | |

[1372] The aqueous solution of circRNA is prepared as a stock solution with 75 mM Citrate buffer at pH 6.0 the circRNA at 1.250 mg/ml. The concentration of the RNA is then adjusted to 0.1037 mg/ml with 75 mM citrate buffer at pH 6.0, equilibrated to 26° C. The solution is then incubated at 26° C. for a minimum of 25 min.

[1373] The microfluidic chamber is cleaned with ethanol and neMYSIS syringe pumps are prepared by loading a syringe with the RNA solution and another syringe with the ethanolic lipid. Both syringes are loaded and under the control of neMESYS software. The solutions are then applied to the mixing chip at an aqueous to organic phase ratio of 2 and a total flow rate of 22 ml/min (14.67 ml/min for RNA and 7.33 ml/min for the lipid solution. Both pumps are started synchronously. The mixer solution that flowed from the microfluidic chip is collected in 4×1 ml fractions with the first fraction being discarded as waste. The remaining solution containing the circRNA-transfer vehicles is exchanged by using G-25 mini desalting columns to 10 mM Tris-HCl, 1 mM EDTA, at pH 7.5, as described above. Following buffer exchange, the materials are characterized for size, and RNA entrapment through DLS analysis and Ribogreen assays, respectively. The biophysical analysis of the liposomes is shown in Table 35.

TABLE 35

| | | | | RNA | RNA | | |
|---|---|---|---|---|---|---|---|
| | | | Ratio | encapsulation | encapsulation | | |
| Sample | N:P | TFR | (aqueous/ | amount | yield | size | |
| Name | Ratio | ml/min | org phase) | (μg/ml) | % | d · nm | PDI |
| SAM- | 8 | 22 | 2 | 31.46 | 86.9 | 113.1 | 0.12 |
| RV94 | | | | | | | |

### Example 31

### General Protocol for in Line Mixing

[1374] Individual and separate stock solutions are prepared—one containing lipid and the other circRNA. Lipid stock containing a desired lipid or lipid mixture, DSPC, cholesterol and PEG lipid is prepared by solubilized in 90% ethanol. The remaining 10% is low pH citrate buffer. The concentration of the lipid stock is 4 mg/mL. The pH of this citrate buffer can range between pH 3 and pH 5, depending on the type of lipid employed. The circRNA is also solubilized in citrate buffer at a concentration of 4 mg/mL. 5 mL of each stock solution is prepared.

[1375] Stock solutions are completely clear and lipids are ensured to be completely solubilized before combining with circRNA. Stock solutions may be heated to completely solubilize the lipids. The circRNAs used in the process may be unmodified or modified oligonucleotides and may be conjugated with lipophilic moieties such as cholesterol.

[1376] The individual stocks are combined by pumping each solution to a T-junction. A dual-head Watson-Marlow pump was used to simultaneously control the start and stop of the two streams. A 1.6 mm polypropylene tubing is further downsized to 0.8 mm tubing in order to increase the linear flow rate. The polypropylene line (ID=0.8 mm) are attached to either side of a T-junction. The polypropylene T has a linear edge of 1.6 mm for a resultant volume of 4.1 mm³. Each of the large ends (1.6 mm) of polypropylene line is placed into test tubes containing either solubilized lipid stock or solubilized circRNA. After the T-junction, a single tubing is placed where the combined stream exited. The tubing is then extended into a container with 2× volume of PBS, which is rapidly stirred. The flow rate for the pump is at a setting of 300 rpm or 110 mL/min. Ethanol is removed and exchanged for PBS by dialysis. The lipid formulations are then concentrated using centrifugation or diafiltration to an appropriate working concentration.

[1377] C57BL/6 mice (Charles River Labs, MA) receive either saline or formulated circRNA via tail vein injection. At various time points after administration, serum samples are collected by retroorbital bleed. Serum levels of Factor VII protein are determined in samples using a chromogenic assay (Biophen FVTI, Aniara Corporation, OH). To determine liver RNA levels of Factor VII, animals are sacrificed and livers are harvested and snap frozen in liquid nitrogen. Tissue lysates are prepared from the frozen tissues and liver RNA levels of Factor VII are quantified using a branched DNA assay (QuantiGene Assay, Panomics, CA).

[1378] FVII activity is evaluated in FVTI siRNA-treated animals at 48 hours after intravenous (bolus) injection in C57BL/6 mice. FVII is measured using a commercially available kit for determining protein levels in serum or tissue, following the manufacturer's instructions at a microplate scale. FVII reduction is determined against untreated control mice, and the results are expressed as % Residual FVII. Two dose levels (0.05 and 0.005 mg/kg FVII siRNA) are used in the screen of each novel liposome composition.

### Example 32

### circRNA Formulation Using Preformed Vesicles

[1379] Cationic lipid containing transfer vehicles are made using the preformed vesicle method. Cationic lipid, DSPC, cholesterol and PEG-lipid are solubilized in ethanol at a molar ratio of 40/10/40/10, respectively. The lipid mixture is added to an aqueous buffer (50 mM citrate, pH 4) with mixing to a final ethanol and lipid concentration of 30% (vol/vol) and 6.1 mg/mL respectively and allowed to equilibrate at room temperature for 2 min before extrusion. The hydrated lipids are extruded through two stacked 80 nm pore-sized filters (Nuclepore) at 22° C. using a Lipex Extruder (Northern Lipids, Vancouver, BC) until a vesicle diameter of 70-90 nm, as determined by Nicomp analysis, is obtained. For cationic lipid mixtures which do not form small vesicles, hydrating the lipid mixture with a lower pH buffer (50 mM citrate, pH 3) to protonate the phosphate group on the DSPC headgroup helps form stable 70-90 nm vesicles.

[1380] The FVII circRNA (solubilised in a 50 mM citrate, pH 4 aqueous solution containing 30% ethanol) is added to the vesicles, pre-equilibrated to 35° C., at a rate of ˜5 mL/min with mixing. After a final target circRNA/lipid ratio of 0.06 (wt wt) is achieved, the mixture is incubated for a further 30 min at 35° C. to allow vesicle re-organization and encapsulation of the FVII RNA. The ethanol is then removed and the external buffer replaced with PBS (155 mM NaCl, 3 mM Na2HP04, 1 mM KH2P04, pH 7.5) by either dialysis or tangential flow diafiltration. The final encapsulated circRNA-to-lipid ratio is determined after removal of unencapsulated RNA using size-exclusion spin columns or ion exchange spin columns.

### Example 33

### Expression of Trispecific Antigen Binding Proteins from Engineered Circular RNA

[1381] Circular RNAs are designed to include: (1) a 3′ post splicing group I intron fragment; (2) an Internal Ribosome Entry Site (IRES); (3) a trispecific antigen-binding protein coding region; and (4) a 3′ homology region. The trispecific antigen-binding protein regions are constructed to produce an exemplary trispecific antigen-binding protein that will bind to a target antigen, e.g., GPC3.

Generation of a scFv CD3 Binding Domain

[1382] The human CD3epsilon chain canonical sequence is Uniprot Accession No. P07766. The human CD3gamma chain canonical sequence is Uniprot Accession No. P09693. The human CD3delta chain canonical sequence is Uniprot Accession No. P043234. Antibodies against CD3epsilon, CD3gamma or CD3delta are generated via known technologies such as affinity maturation. Where murine anti-CD3 antibodies are used as a starting material, humanization of murine anti-CD3 antibodies is desired for the clinical setting, where the mouse-specific residues may induce a human-anti-mouse antigen (HAMA) response in subjects who receive treatment of a trispecific antigen-binding protein described herein. Humanization is accomplished by grafting CDR regions from murine anti-CD3 antibody onto appropriate human germline acceptor frameworks, optionally including other modifications to CDR and/or framework regions.

[1383] Human or humanized anti-CD3 antibodies are therefore used to generate scFv sequences for CD3 binding domains of a trispecific antigen-binding protein. DNA sequences coding for human or humanized VL and VH domains are obtained, and the codons for the constructs are, optionally, optimized for expression in cells from Homo sapiens. The order in which the VL and VH domains appear in the scFv is varied (i.e. VL-VH, or VH-VL orientation), and three copies of the “G4S” or “G₄S” subunit (G₄S)₃ connect the variable domains to create the scFv domain. Anti-CD3 scFv plasmid constructs can have optional Flag, His or other affinity tags, and are electroporated into HEK293 or other suitable human or mammalian cell lines and purified. Validation assays include binding analysis by FACS, kinetic analysis using Proteon, and staining of CD3-expressing cells.

Generation of a scFv Glypican-3 (GPC3) Binding Domain

[1384] Glypican-3 (GPC3) is one of the cell surface proteins present on Hepatocellular Carcinoma but not on healthy normal liver tissue. It is frequently observed to be elevated in hepatocellular carcinoma and is associated with poor prognosis for HCC patients. It is known to activate Wnt signalling. GPC3 antibodies have been generated including MDX-1414, HN3, GC33, and YP7.

[1385] A scFv binding to GPC-3 or another target antigen is generated similarly to the above method for generation of a scFv binding domain to CD3.

### Expression of Trispecific Antigen-Binding Proteins In Vitro

[1386] A CHO cell expression system (Flp-In®, Life Technologies), a derivative of CHO-K1 Chinese Hamster ovary cells (ATCC, CCL-61) (Kao and Puck, Proc. Natl. Acad Sci USA 1968; 60(4):1275-81), is used. Adherent cells are subcultured according to standard cell culture protocols provided by Life Technologies.

[1387] For adaption to growth in suspension, cells are detached from tissue culture flasks and placed in serum-free medium. Suspension-adapted cells are cryopreserved in medium with 10% DMSO.

[1388] Recombinant CHO cell lines stably expressing secreted trispecific antigen-binding proteins are generated by transfection of suspension-adapted cells. During selection with the antibiotic Hygromycin B viable cell densities are measured twice a week, and cells are centrifuged and resuspended in fresh selection medium at a maximal density of 0.1×10⁶ viable cells/mL. Cell pools stably expressing trispecific antigen-binding proteins are recovered after 2-3 weeks of selection at which point cells are transferred to standard culture medium in shake flasks. Expression of recombinant secreted proteins is confirmed by performing protein gel electrophoresis or flow cytometry. Stable cell pools are cryopreserved in DMSO containing medium.

[1389] Trispecific antigen-binding proteins are produced in 10-day fed-batch cultures of stably transfected CHO cell lines by secretion into the cell culture supernatant. Cell culture supernatants are harvested after 10 days at culture viabilities of typically >75%. Samples are collected from the production cultures every other day and cell density and viability are assessed. On day of harvest, cell culture supernatants are cleared by centrifugation and vacuum filtration before further use.

[1390] Protein expression titers and product integrity in cell culture supernatants are analyzed by SDS-PAGE.

### Purification of Trispecific Antigen-Binding Proteins

[1391] Trispecific antigen-binding proteins are purified from CHO cell culture supernatants in a two-step procedure. The constructs are subjected to affinity chromatography in a first step followed by preparative size exclusion chromatography (SEC) on Superdex 200 in a second step. Samples are buffer-exchanged and concentrated by ultrafiltration to a typical concentration of >1 mg/mL Purity and homogeneity (typically >90%) of final samples are assessed by SDS PAGE under reducing and non-reducing conditions, followed by immunoblotting using an anti-(half-life extension domain) or anti idiotype antibody as well as by analytical SEC, respectively. Purified proteins are stored at aliquots at −80° C. until use.

### Example 34

### Expression of Engineered Circular RNA with a Half-Life Extension Domain has Improved Pharmacokinetic Parameters than without a Half-Life Extension Domain

[1392] The trispecific antigen-binding protein encoded on a circRNA molecule of example 23 is administered to cynomolgus monkeys as a 0.5 mg/kg bolus injection intramuscularly. Another cynomolgus monkey group receives a comparable protein encoded on a circRNA molecule in size with binding domains to CD3 and GPC-3, but lacking a half-life extension domain. A third and fourth group receive a protein encoded on a circRNA molecule with CD3 and half-life extension domain binding domains and a protein with GPC-3 and half-life extension domains, respectively. Both proteins encoded by circRNA are comparable in size to the trispecific antigen-binding protein. Each test group consists of 5 monkeys. Serum samples are taken at indicated time points, serially diluted, and the concentration of the proteins is determined using a binding ELISA to CD3 and/or GPC-3.

[1393] Pharmacokinetic analysis is performed using the test article plasma concentrations. Group mean plasma data for each test article conforms to a multi-exponential profile when plotted against the time post-dosing. The data are fit by a standard two-compartment model with bolus input and first-order rate constants for distribution and elimination phases. The general equation for the best fit of the data for i.v. administration is: c(t)=Ae^{˜at}+Be^{˜Pt}, where c(t) is the plasma concentration at time t, A and B are intercepts on the Y-axis, and a and β are the apparent first-order rate constants for the distribution and elimination phases, respectively. The a-phase is the initial phase of the clearance and reflects distribution of the protein into all extracellular fluid of the animal, whereas the second or β-phase portion of the decay curve represents true plasma clearance. Methods for fitting such equations are well known in the art. For example, A=D/V(a−k21)/(a−p), B=D/V(p−k21)/(a−p), and a and β (for α>β) are roots of the quadratic equation: r²+(k12+k21+k10)r+k21k10=0 using estimated parameters of V=volume of distribution, k10=elimination rate, k12=transfer rate from compartment 1 to compartment 2 and k21=transfer rate from compartment 2 to compartment 1, and D=the administered dose.

[1394] Data analysis: Graphs of concentration versus time profiles are made using KaleidaGraph (KaleidaGraph™ V. 3.09 Copyright 1986-1997. Synergy Software. Reading, Pa.). Values reported as less than reportable (LTR) are not included in the PK analysis and are not represented graphically. Pharmacokinetic parameters are determined by compartmental analysis using WinNonlin software (WinNonlin® Professional V. 3.1 WinNonlin™ Copyright 1998-1999. Pharsight Corporation. Mountain View, Calif). Pharmacokinetic parameters are computed as described in Ritschel W A and Kearns G L, 1999, EST: Handbook Of Basic Pharmacokinetics Including Clinical Applications, 5th edition, American Pharmaceutical Assoc., Washington, D C.

[1395] It is expected that the trispecific antigen-binding protein encoded on a circRNA molecule of Example 23 has improved pharmacokinetic parameters such as an increase in elimination half-time as compared to proteins lacking a half-life extension domain.

### Example 35

### Cytotoxicity of the Trispecific Antigen-Binding Protein

[1396] The trispecific antigen-binding protein encoded on a circRNA molecule of Example 23 is evaluated in vitro on its mediation of T cell dependent cytotoxicity to GPC-3+ target cells.

[1397] Fluorescence labeled GPC3 target cells are incubated with isolated PBMC of random donors or T-cells as effector cells in the presence of the trispecific antigen-binding protein of Example 23. After incubation for 4 h at 37° C. in a humidified incubator, the release of the fluorescent dye from the target cells into the supernatant is determined in a spectrofluorimeter. Target cells incubated without the trispecific antigen-binding protein of Example 23 and target cells totally lysed by the addition of saponin at the end of the incubation serve as negative and positive controls, respectively.

[1398] Based on the measured remaining living target cells, the percentage of specific cell lysis is calculated according to the following formula: [1−(number of living targets(sample)/number of living targets(spontaneous))]×100%. Sigmoidal dose response curves and EC50 values are calculated by non-linear regression/4-parameter logistic fit using the GraphPad Software. The lysis values obtained for a given antibody concentration are used to calculate sigmoidal dose-response curves by 4 parameter logistic fit analysis using the Prism software.

### Example 36

### Synthesis of Ionizable Lipids

### 38.1 Synthesis of ((3-(2-methyl-1H-imidazol-1-yl)propyl)azanediyl)bis(hexane-6,1-diyl) bis(2-hexyldecanoate)(Lipid 27, Table 10a) and ((3-(1H-imidazol-1-yl)propyl)azanediyl)bis(hexane-6,1-diyl) bis(2-hexyldecanoate))(Lipid 26, Table 10a)

[1399] In a 100 mL round bottom flask connected with condenser, 3-(1H-imidazol-1-yl)propan-1-amine (100 mg, 0.799 mmol) or 3-(2-methyl-1H-imidazol-1-yl)propan-1-amine (0.799 mmol), 6-bromohexyl 2-hexyldecanoate (737.2 mg, 1.757 mmol), potassium carbonate (485 mg, 3.515 mmol) and potassium iodide (13 mg, 0.08 mmol) were mixed in acetonitrile (30 mL), and the reaction mixture was heated to 80° C. for 48 h. The mixture was cooled to room temperature and was filtered through a pad of Celite. The filtrate was diluted with ethyl acetate. After washing with water, brine and dried over anhydrous sodium sulfate. The solvent was evaporated and the crude residue was purified by flash chromatography (SiO₂:CH₂Cl₂=100% to 10% of methanol in CH₂Cl₂) and colorless oil product was obtained (92 mg, 15%). Molecular formula of ((3-(1H-imidazol-1-yl)propyl)azanediyl)bis(hexane-6,1-diyl) bis(2-hexyldecanoate)) is C₅₀H₉₅N₃O₄ and molecular weight (M_{w}) is 801.7.

[1400] Reaction scheme for synthesis of ((3-(1H-imidazol-1-yl)propyl)azanediyl)bis(hexane-6,1-diyl) bis(2-hexyldecanoate)) (Lipid 26, Table 10a).

[chemical structure]

[1401] Characterization of Lipid 26 was performed by LC-MS. FIG. 27A-C shows characterization of Lipid 26. FIG. 27A shows the proton NMR observed for Lipid 26. FIG. 27B is a representative LC/MS trace for Lipid 26 with total ion and UV chromatograms shown.

### 38.2 Synthesis of Lipid 22-S14

### 38.2.1 Synthesis of 2-(tetradecylthio)ethan-1-ol

[1402] To a mixture of 2-sulfanylethanol (5.40 g, 69.11 mmol, 4.82 mL, 0.871 eq) in acetonitrile (200 mL) was added 1-Bromotetradecane (22 g, 79.34 mmol, 23.66 mL, 1 eq) and potassium carbonate (17.55 g, 126.95 mmol, 1.6 eq) at 25° C. The reaction mixture was warmed to 40° C. and stirred for 12 hr. TLC (ethyl acetate/petroleum ether=25/1, R_{f}=0.3, stained by I₂) showed the starting material was consumed completely and a new main spot was generated. The reaction mixture was filtered and the filter cake was washed with acetonitrile (50 mL) and then the filtrate was concentrated under vacuum to get a residue which was purified by column on silica gel (ethyl acetate/petroleum ether=1/100 to 1/25) to afford 2-(tetradecylthio)ethan-1-ol (14 g, yield 64.28%) as a white solid.

[1403] ¹H NMR (ET36387-45-P1A, 400 MHz, CHLOROFORM-d) δ 0.87-0.91 (m, 3H) 1.27 (s, 20H) 1.35-1.43 (m, 2H) 1.53-1.64 (m, 2H) 2.16 (br s, 1H) 2.49-2.56 (m, 2H) 2.74 (t, J=5.93 Hz, 2H) 3.72 (br d, J=4.89 Hz, 2H). FIG. 28 shows corresponding Nuclear Magnetic Resonance (NMR) spectrum.

### 38.2.2 Synthesis of 2-(tetradecylthio)ethyl acrylate

[1404] To a solution of 2-(tetradecylthio)ethan-1-ol (14 g, 51.00 mmol, 1 eq) in dichloromethane (240 mL) was added triethylamine (7.74 g, 76.50 mmol, 10.65 mL, 1.5 eq) and prop-2-enoyl chloride (5.54 g, 61.20 mmol, 4.99 mL, 1.2 eq) dropwise at 0° C. under nitrogen. The reaction mixture was warmed to 25° C. and stirred for 12 hr. TLC (ethyl acetate/petroleum ether=25/1, Rf=0.5, stained by I₂) showed the starting material was consumed completely and a new main spot was generated. The reaction solution was concentrated under vacuum to get crude which was purified by column on silica gel (ethyl acetate/petroleum ether=1/100 to 1/25) to afford 2-(tetradecylthio)ethyl acrylate (12 g, yield 71.61%) as a colorless oil.

[1405] ¹H NMR (ET36387-49-P1A, 400 MHz, CHLOROFORM-d) δ 0.85-0.93 (m, 3H) 1.26 (s, 19H) 1.35-1.43 (m, 2H) 1.53-1.65 (m, 2H) 2.53-2.62 (m, 2H) 2.79 (t, J=7.03 Hz, 2H) 4.32 (t, J=7.03 Hz, 2H) 5.86 (dd, J=10.39, 1.47 Hz, 1H) 6.09-6.19 (m, 1H) 6.43 (dd, J=17.30, 1.41 Hz, 1H). FIG. 29 shows corresponding Nuclear Magnetic Resonance (NMR) spectrum.

### 38.2.3 Synthesis of bis(2-(tetradecylthio)ethyl) 3,3′-((3-(2-methyl-1H-imidazol-1-yl)propyl)azanediyl)dipropionate (Lipid 22-S14)

[1406] A flask was charged with 3-(2-methyl-1H-imidazol-1-yl)propan-1-amine (300 mg, 2.16 mmol) and 2-(tetradecylthio)ethyl acrylate (1.70 g, 5.17 mmol). The neat reaction mixture was heated to 80° C. and stirred for 48 hr. TLC (ethyl acetate, R_{f}=0.3, stained by I₂, one drop ammonium hydroxide added) showed the starting material was consumed completely and a new main spot was formed. The reaction mixture was diluted with dichloromethane (4 mL) and purified by column on silica gel (petroleum ether/ethyl acetate=3/1 to 0/1, 0.1% ammonium hydroxide added) to get bis(2-(tetradecylthio)ethyl) 3,3′-((3-(2-methyl-TH-imidazol-1-yl)propyl)azanediyl)dipropionate (501 mg, yield 29.1%) as colorless oil.

[1407] ¹H NMR (ET36387-51-PTA, 400 MHz, CHLOROFORM-d) δ 0.87 (t, J=6.73 Hz, 6H) 1.25 (s, 40H) 1.33-1.40 (m, 4H) 1.52-1.61 (m, 4H) 1.81-1.90 (m, 2H) 2.36 (s, 3H) 2.39-2.46 (m, 6H) 2.53 (t, J=7.39 Hz, 4H) 2.70-2.78 (m, 8H) 3.84 (t, J=7.17 Hz, 2H) 4.21 (t, J=6.95 Hz, 4H) 6.85 (s, 1H) 6.89 (s, 1H). FIG. 30 shows corresponding Nuclear Magnetic Resonance (NMR) spectrum.

### 38.3 Synthesis of bis(2-(tetradecylthio)ethyl) 3,3′-((3-(1H-imidazol-1-yl)propyl)azanediyl)dipropionate (Lipid 93-S14)

[1408] A flask was charged with 3-(1H-imidazol-1-yl)propan-1-amine (300 mg, 2.40 mmol, 1 eq) and 2-(tetradecylthio)ethyl acrylate (1.89 g, 5.75 mmol, 2.4 eq). The neat reaction mixture was heated to 80° C. and stirred for 48 hr. TLC (ethyl acetate, R_{f}=0.3, stained by 12, one drop ammonium hydroxide added) showed the starting material was consumed completely and a new main spot was formed. The reaction mixture was diluted with dichloromethane (4 mL) and purified by column on silica gel (petroleum ether/ethyl acetate=1/20-0/100, 0.1% ammonium hydroxide added) to get bis(2-(tetradecylthio)ethyl) 3,3′-((3-(1H-imidazol-1-yl)propyl)azanediyl)dipropionate (512 mg, yield 27.22%) as colorless oil.

[1409] ¹H NMR (ET36387-54-P1A, 400 MHz, CHLOROFORM-d) δ 0.89 (t, J=6.84 Hz, 6H) 1.26 (s, 40H) 1.34-1.41 (m, 4H) 1.58 (br t, J=7.50 Hz, 4H) 1.92 (t, J=6.62 Hz, 2H) 2.36-2.46 (m, 6H) 2.55 (t, J=7.50 Hz, 4H) 2.75 (q, J=6.84 Hz, 8H) 3.97 (t, J=6.95 Hz, 2H) 4.23 (t, J=6.95 Hz, 4H) 6.95 (s, 1H) 7.06 (s, 1H) 7.51 (s, 1H). FIG. 31 shows corresponding Nuclear Magnetic Resonance (NMR) spectrum.

### 38.4 Synthesis of heptadecan-9-yl 8-((3-(2-methyl-1H-imidazol-1-yl)propyl)(8-(nonyloxy)-8-oxooctyl)amino)octanoate (Lipid 54, Table 10a) 38.4.1 Synthesis of nonyl 8-bromooctanoate (3)

[chemical structure]

[1411] To a mixture of 8-bromooctanoic acid (2) (18.6 g, 83.18 mmol) and nonan-1-ol (1) (10 g, 69.32 mmol) in CH₂Cl₂ (500 mL) was added DMAP (1.7 g, 13.86 mmol), DIPEA (48 mL, 277.3 mmol) and EDC (16 g, 83.18 mmol). The reaction was stirred at room temperature overnight. After concentration of the reaction mixture, the crude residue was dissolved in ethyl acetate (500 mL), washed with 1N HCl, sat. NaHCO₃, water and Brine. The organic layer was dried over anhydrous Na₂SO₄. The solvent was evaporated and the crude residue was purified by flash chromatography (SiO₂:Hexane=100% to 30% of EtOAc in Hexane) and colorless oil product 3 was obtained (9 g, 37%).

### 38.4.2 Synthesis of heptadecan-9-yl 8-bromooctanoate (5)

[chemical structure]

[1413] To a mixture of 8-bromooctanoic acid (2) (10 g, 44.82 mmol) and heptadecan-9-ol (4) (9.6 g, 37.35 mmol) in CH₂Cl₂ (300 mL) was added DMAP (900 mg, 7.48 mmol), DIPEA (26 mL, 149.7 mmol) and EDC (10.7 g, 56.03 mmol). The reaction was stirred at room temperature overnight. After concentration of the reaction mixture, the crude residue was dissolved in ethyl acetate (300 mL), washed with 1N HCl, sat. NaHCO₃, water and Brine. The organic layer was dried over anhydrous Na₂SO₄. The solvent was evaporated and the crude residue was purified by flash chromatography (SiO₂:Hexane=100% to 30% of EtOAc in Hexane) and colorless oil product 5 was obtained (5 g, 29%).

### 38.4.3 Synthesis of heptadecan-9-yl 8-((3-(2-methyl-1H-imidazol-1-yl)propyl)amino)octanoate (7)

[chemical structure]

[1415] In a 100 mL round bottom flask connected with condenser, heptadecan-9-yl 8-bromooctanoate (5) (860 mg, 1.868 mmol) and 3-(2-methyl-1H-imidazol-1-yl)propan-1-amine (6) (1.3 g, 9.339 mmol) were mixed in ethanol (10 mL). The reaction mixture was heated to reflux overnight. MS (APCI) showed the expected product. The mixture was cooled to room temperature and concentrated. The crude residue was purified by flash chromatography (SiO₂:CH₂Cl₂=100% to 10% of methanol+1% NH₄OH in CH₂Cl₂) and colorless oil product 7 was obtained (665 mg, 69%).

### 38.4.4 Synthesis of heptadecan-9-yl 8-((3-(2-methyl-1H-imidazol-1-yl)propyl)(8-(nonyloxy)-8-oxooctyl)amino)octanoate (Lipid 54, Table 10a)

[chemical structure]

[1417] In a 100 mL round bottom flask connected with condenser, heptadecan-9-yl 8-((3-(2-methyl-1H-imidazol-1-yl)propyl)amino)octanoate (7) (665 mg, 1.279 mmol) and nonyl 8-bromooctanoate (3) (536 mg, 1.535 mmol) were mixed in ethanol (10 mL), then DIPEA (0.55 mL, 3.198 mmol) was added. The reaction mixture was heated to reflux overnight. Both MS (APCI) and TLC (10% MeOH+1% NH₄OH in CH₂Cl₂) showed the product and some unreacted starting material. The mixture was cooled to room temperature and concentrated. The crude residue was purified by flash chromatography (SiO₂:CH₂Cl₂=100% to 10% of methanol+1% NH₄OH in CH₂Cl₂) and colorless oil was obtained (170 mg, 17%).

### 38.5 Synthesis of heptadecan-9-yl 8-((3-(1H-imidazol-1-yl)propyl)(8-(nonyloxy)-8-oxooctyl)amino)octanoate (Lipid 53, Table 10a)

[chemical structure]

[1419] Lipid 53 from Table 10a is synthesized according to the scheme above. Reaction conditions are identical to Lipid 54 with the exception of 3-(1H-imidazol-1-yl)propan-1-amine as the imidazole amine.

### Example 37

### Lipid Nanoparticle Formulation with Circular RNA

[1420] Lipid Nanoparticles (LNPs) were formed using a Precision Nanosystems Ignite instrument with a ‘NextGen’ mixing chamber. Ethanol phase contained ionizable Lipid 26 from Table 10a, DSPC, Cholesterol, and DSPE-PEG 2000 (Avanti Polar Lipids Inc.) at a weight ratio of 16:1:4:1 or 62:4:33:1 molar ratio was combined with an aqueous phase containing circular RNA and 25 mM sodium acetate buffer at pH 5.2. A 3:1 aqueous to ethanol mixing ratio was used. The formulated LNP then were dialyzed in 1 L of water and exchanged 2 times over 18 hours. Dialyzed LNPs were filtered using 0.2 μm filter. Prior to in vivo dosing, LNPs were diluted in PBS. LNP sizes were determined by dynamic light scattering. A cuvette with 1 mL of 20 μg/mL LNPs in PBS (pH 7.4) was measured for Z-average using the Malvern Panalytical Zetasizer Pro. The Z-average and polydispersity index were recorded.

### 39.1 Formulation of Lipids 26 and 27 from Table 10a

[1421] Lipid Nanoparticles (LNPs) were formed using a Precision Nanosystems Ignite instrument with a ‘NextGen’ mixing chamber. Ethanol phase contained ionizable Lipid 26 or Lipid 27 from Table 10a, DOPE, Cholesterol, and DSPE-PEG 2000 (Avanti Polar Lipids Inc.) at a weight ratio of 16:1:4:1 or 62:4:33:1 molar ratio was combined with an aqueous phase containing circular RNA and 25 mM sodium acetate buffer at pH 5.2. A 3:1 aqueous to ethanol mixing ratio was used. The formulated LNPs were then dialyzed in 1 L of water and exchanged 2 times over 18 hours. Dialyzed LNPs were filtered using 0.2 μm filter. Prior to in vivo dosing, LNPs were diluted in PBS. LNP sizes were determined by dynamic light scattering. A cuvette with 1 mL of 20 μg/mL LNPs in PBS (pH 7.4) was measured for Z-average using the Malvern Panalytical Zetasizer Pro. The Z-average and polydispersity index were recorded.

### 39.2 Formulation of Lipids 53 and 54 from Table 10a

[1422] Lipid Nanoparticles (LNPs) were formed using a Precision Nanosystems Ignite instrument with a ‘NextGen’ mixing chamber. Ethanol phase contained ionizable Lipid 53 or 54 of Table 10a, DOPE, Cholesterol, and DSPE-PEG 2000 (Avanti Polar Lipids Inc.) at a molar ratio of 50:10:38.5:1.5 was combined with an aqueous phase containing circular RNA and 25 mM sodium acetate buffer at pH 5.2. A 3:1 aqueous to ethanol mixing ratio was used. The formulated LNPs were then dialyzed in 1 L of 1×PBS and exchanged 2 times over 18 hours. Dialyzed LNPs were filtered using 0.2 μm filter. Prior to in vivo dosing, LNPs were diluted in PBS. LNP sizes were determined by dynamic light scattering. A cuvette with 1 mL of 20 μg/mL LNPs in PBS (pH 7.4) was measured for Z-average using the Malvern Panalytical Zetasizer Pro. The Z-average and polydispersity index were recorded.

[1423] LNP zeta potential was measured using the Malvern Panalytical Zetasizer Pro. A mixture containing 200 μL of the particle solution in water and 800 μL of distilled RNAse-free water with a final particle concentration of 400 μg/mL was loaded into a zetasizer capillary cell for analysis.

[1424] RNA encapsulation was determined using a Ribogreen assay. Nanoparticle solutions were diluted in tris-ethylenediaminetetraacetic acid (TE) buffer at a theoretical oRNA concentration of 2 μg/mL. Standard oRNA solutions diluted in TE buffer were made ranging from 2 μg/mL to 0.125 μg/mL. The particles and standards were added to all wells and a second incubation was performed (37° C. at 350 rpm for 3 minutes). Fluorescence was measured using a SPECTRAmax® GEMINI XS microplate spectrofluorometer. The concentration of circular RNA in each particle solution was calculated using the standard curve. The encapsulation efficiency was calculated from the ratio of oRNA detected between lysed and unlysed particles.

TABLE 36a
Characterization of LNPs

| | | | Encapsulation | Zeta Data |
|---|---|---|---|---|
| Ionizable Lipid | Size (nm) | PDI | Efficiency (%) | Potential (mV) |
| 22-S14 | 88 | 0.09 | 96 | 3.968 |
| 93-S14 | 119 | 0.02 | 96 | −6.071 |
| Lipid 26, Table 10a | 86 | 0.08 | 92 | −15.24 |

TABLE 36b
Characterization of LNPs

| | | | RNA |
|---|---|---|---|
| Ionizable Lipid | Z-Average(nm) | PDI | Entrapment(%) |
| 22-S14 | 64 | 0.05 | 97 |
| 93-S14 | 74 | 0.04 | 95 |
| Lipid 26, Table 10a | 84 | 0.04 | 96 |

### Example 38

### In Vivo Analysis

[1425] Female CD-1 or female c57BL/6J mice ranging from 22-25 g were dosed at 0.5 mg/kg RNA intravenously. Six hours after injection, mice were injected intraperitoneally with 200 μL of D-luciferin at 15 mg/mL concentration. 5 minutes after injection, mice were anesthetized using isoflurane, and placed inside the IVIS Spectrum In Vivo Imaging System (Perkin Elmer) with dorsal side up. Whole body total IVIS flux of Lipids 22-514, 93-514, Lipid 26 (Table 10a) is presented in FIG. 32A. Post 10 minutes injection, mice were scanned for luminescence. Mice were euthanized and organs were extracted within 25 minutes of luciferin injection to scan for luminescence in liver, spleen, kidneys, lungs, and heart. Images (FIGS. 33A-B, 34A-B, 35A-B) were analyzed using Living Images (Perkin Elmer) software. Regions of interest were drawn to obtain flux and average radiance and analyzed for biodistribution of protein expression (FIG. 32A-B).

[1426] FIG. 32A illustrates the increased whole-body total flux observed from luciferase oRNA with Lipid 26 (Table 10a) LNPs compared to LNPs made with lipids 22-S14 and 93-S14. FIG. 32B shows the ex vivo IVIS analysis of tissues further highlighting the increased overall expression with Lipid 26 (Table 10a) while maintaining the desired spleen to liver ratios observed with lipids 22-S14 and 93-S14 despite the significant structural changes designed to improve expression. These data highlight the improvements afforded by Lipid 26 (Table 10a) compared to previously reported lipids.

[1427] Similar analysis as described above was also performed with oRNA encapsulated in LNPs formed with Lipid 15 from Table 10b or Lipid 53 or 54 from Table 10a. FIGS. 36A-C show the ex vivo IVIS analysis of tissues, respectively highlighting the overall expression with Lipid 15, 53, and 54 while maintaining the desired spleen to liver ratios despite the significant structural changes designed to improve expression. FIG. 36D shows the results for PBS control. These data demonstrates the improvements afforded by Lipids 15, 53, and 54 from Table 10a compared to previously reported lipids such as 93-S14 and 22-S14.

### Example 39

### Delivery of Luciferase

[1428] Human peripheral blood mononuclear cells (PBMCs) (Stemcell Technologies) were transfected with lipid nanoparticles (LNP) encapsulating firefly luciferase (fluc) circular RNA and examined for luciferase expression. PBMCs from two different donors were incubated in vitro with five different LNP compositions, containing circular RNA encoding for firefly luciferase (200 ng), at 37° C. in RPMI, 2% human serum, IL-2 (10 ng/mL), and 50 uM BME. PBMCs incubated without LNP were used as a negative control. After 24 hours, the cells were lysed and analyzed for firefly luciferase expression based on bioluminescence (Promega BrightGlo).

[1429] Representative data are presented in FIGS. 37A and 37B, showing that that the tested LNPs are capable of delivering circular RNA into primary human immune cells resulting in protein expression.

### Example 40

### In Vitro Delivery of Green Fluorescent Protein (GFP) or Chimeric Antigen Receptor (CAR)

[1430] Human PBMCs (Stemcell Technologies) were transfected with LNP encapsulating GFP and examined by flow cytometry. PBMCs from five different donors (PBMC A-E) were incubated in vitro with one LNP composition, containing circular RNA encoding either GFP or CD19-CAR (200 ng), at 37° C. in RPMI, 2% human serum, IL-2 (10 ng/mL), and 50 uM BME. PBMCs incubated without LNP were used as a negative control. After 24, 48, or 72 hours post-LNP incubation, cells were analyzed for CD3, CD19, CD56, CD14, CD1 Ib, CD45, fixable live dead, and payload (GFP or CD19-CAR).

[1431] Representative data are presented in FIGS. 38A and 38B, showing that the tested LNP is capable of delivering circular RNA into primary human immune cells resulting in protein expression.

### Example 41

### Multiple IRES Variants can Mediate Expression of Murine CD19 CAR In Vitro

[1432] Multiple circular RNA constructs, encoding anti-murine CD19 CAR, contains unique IRES sequences and were lipotransfected into 1C1C7 cell lines. Prior to lipotransfection, 1C1C7 cells are expanded for several days in complete RPMI Once the cells expanded to appropriate numbers, 1C1C7 cells were lipotransfected (Invitrogen RNAiMAX) with four different circular RNA constructs. After 24 hours, 1C1C7 cells were incubated with His-tagged recombinant murine CD19 (Sino Biological) protein, then stained with a secondary anti-His antibody. Afterwards, the cells were analyzed via flow cytometry.

[1433] Representative data are presented in FIGS. 39, showing that IRES sourced from the indicated virus (apodemus agrarius picornavirus, caprine kobuvirus, parabovirus, and salivirus) are capable of driving expression of an anti-mouse CD19 CAR in murine T cells.

### Example 42

### Murine CD19 CAR Mediates Tumor Cell Killing In Vitro

[1434] Circular RNA encoding anti-mouse CD19 CAR were electroporated into murine T cells to evaluate CAR-mediated cytotoxicity. For electroporation, T cells were electroporated with circular RNA encoding anti-mouse CD19 CAR using ThermoFisher's Neon Transfection System then rested overnight. For the cytotoxicity assay, electroporated T cells were co-cultured with Fluc+ target and non-target cells at 1:1 ratio in complete RPMI containing 10% FBS, IL-2 (10 ng/mL), and 50 uM BME and incubated overnight at 37° C. Cytotoxicity was measured using a luciferase assay system 24 hours post-co-culture (Promega Brightglo Luciferase System) to detect lysis of Fluc+ target and non-target cells. Values shown are calculated relative to the untransfected mock signal.

[1435] Representative data are presented in FIG. 40, showing that an anti-mouse CD19 CAR expressed from circular RNA is functional in murine T cells in vitro.

### Example 43

### Functional Depletion of B Cells with a Lipid Encapsulated Circular RNA Encoding Murine CD19 CAR

[1436] C57BL/6J mice were injected with LNP formed with Lipid 15 in Table 10b, encapsulating circular RNA encoding anti-murine CD19 CAR. As a control, Lipid 15 in Table 10b encapsulating circular RNA encoding firefly luciferase (fLuc) were injected in different group of mice. Female C57BL.6J, ranging from 20-25 g, were injected intravenously with 5 doses of 0.5 mg/kg of LNP, every other day. Between injections, blood draws were analyzed via flow cytometry for fixable live/dead, CD45, TCRvb, B220, CD11b, and anti-murine CAR. Two days after the last injection, spleens were harvested and processed for flow cytometry analysis. Splenocytes were stained with fixable live/dead, CD45, TCRvb, B220, CD11b, NK1.1, F4/80, CD11c, and anti-murine CAR. Data from mice injected with anti-murine CD19 CAR LNP were normalized to mice that received fLuc LNP.

[1437] Representative data are presented in FIGS. 41A, 41B, and 41C, showing that an anti-mouse CD19 CAR expressed from circular oRNA delivered in vivo with LNPs is functional in murine T cells in vivo.

### Example 44

### CD19 CAR Expressed from Circular RNA has Higher Yield and Greate Cytotoxic Effect Compared to that Expressed from mRNA

[1438] Circular RNA encoding encoding anti-CD19 chimeric antigen antigen receptor, which includes, from N-terminus to C-terminus, a FMC63-derived scFv, a CD8 transmembrane domain, a 4-1BB costimulatory domain, and a CD3 intracellular domain, were electroporated into human peripheral T cells to evaluate surface expression and CAR-mediated cytotoxicity. For comparison, circular RNA-electroporated T cells were compared to mRNA-electroporated T cells in this experiment. For electroporation, CD3+ T cells were isolated from human PBMCs using commercially available T cell isolation kits (Miltenyi Biotec) from donor human PBMCs. After isolation, T cells were stimulated with anti-CD3/anti-CD28 (Stemcell Technologies) and expanded over 5 days at 37° C. in complete RPMI containing 10% FBS, IL-2 (10 ng/mL), and 50 uM BME. Five days post stimulation, T cells were electroporated with circular RNA encoding anti-human CD19 CAR using ThermoFisher's Neon Transfection System and then rested overnight. For the cytotoxicity assay, electroporated T cells were co-cultured with Fluc+ target and non-target cells at 1:1 ratio in complete RPMI containing 10% FBS, IL-2 (10 ng/mL), and 50 uM BME and incubated overnight at 37° C. Cytotoxicity was measured using a luciferase assay system 24 hours post-co-culture (Promega Brightglo Luciferase System) to detect lysis of Fluc+ target and non-target cells. Furthermore, an aliquot of electroporated T cells were taken and stained for live dead fixable staining, CD3, CD45, and chimeric antigen receptors (FMC63) at the day of analysis.

[1439] Representative data are presented in FIGS. 42 and 43. FIGS. 42A and 42B show that an anti-human CD19 CAR expressed from circular RNA is expressed at higher levels and longer than an anti-human CD19 CAR expressed from linear mRNA. FIGS. 43A and 43B show that an anti-human CD19 CAR expressed from circular RNA is exerts a greater cytotoxic effect relativea to anti-human CD19 CAR expressed from linear mRNA.

### Example 45

### Functional Expression of Two CARs from a Single Circular RNA

[1440] Circular RNA encoding chimeric antigen receptors were electroporated into human peripheral T cells to evaluate surface expression and CAR-mediated cytotoxicity. The purpose of this study is to evaluate if circular RNA encoding for two CARs can be stochastically expressed with a 2A (P2A) or an IRES sequence. For electroporation, CD3+ T cells were commercially purchased (Cellero) and stimulated with anti-CD3/anti-CD28 (Stemcell Technologies) and expanded over 5 days at 37° C. in complete RPMI containing 10% FBS, IL-2 (10 ng/mL), and 50 uM BME. Four days post stimulation, T cells were electroporated with circular RNA encoding anti-human CD19 CAR, anti-human CD19 CAR-2A-anti-human BCMA CAR, and anti-human CD19 CAR-IRES-anti-human BCMA CAR using ThermoFisher's Neon Transfection System then rested overnight. For the cytotoxicity assay, electroporated T cells were co-cultured with Fluc+K562 cells expressing human CD19 or BCMA antigens at 1:1 ratio in complete RPMI containing 10% FBS, IL-2 (10 ng/mL), and 50 uM BME and incubated overnight at 37° C. Cytotoxicity was measured using a luciferase assay system 24 hours post-co-culture (Promega BrightGlo Luciferase System) to detect lysis of Fluc+ target cells.

[1441] Representative data are presented in FIG. 44, showing that two CARs can be functionally expressed from the same circular RNA construct and exert cytotoxic effector function.

### Example 46

### In Vivo Circular RNA Transfection Using Cre Reporter Mice

[1442] Circular RNAs encoding Cre recombinase (Cre) are encapsulated into lipid nanoparticles as previously described. Female, 6-8 week old B6.Cg-Gt(ROSA)26Sortm9(CAG-tdTomato)Hze/J (Ai9) mice were dosed with lipid nanoparticles at 0.5 mg/kg RNA intravenously. Fluorescent tdTomato protein was transcribed and translated in Ai9 mice upon Cre recombination, meaning circular RNAs have been delivered to and translated in tdTomato+ cells. After 48 hr, mice were euthanized and the spleens were harvested, processed into a single cell suspension, and stained with various fluorophore-conjugated antibodies for immunophenotyping via flow cytometry.

[1443] FIG. 45A shows representative FACS plots with frequencies of tdTomato expression in various spleen immune cell (CD45+, live) subsets, including total myeloid (CDT1b+), B cells (CD19+), and T cells (TCR-B+) following treatment with LNPs formed with Lipid 27 or 26 from Table 10a or Lipid 15 from Table 10b. Ai9 mice injected with PBS represented background tdTomato fluorescence. FIG. 45B quantifies the proportion of myeloid cells, B cells, and T cells expressing tdTomato (mean+std. dev., n=3), which is equivalent to the proportion of each cell population which has been successfully transfected with Cre circular RNA. LNPs made with Lipids 27 and 26 from Table 10a exhibit significantly higher myeloid and T cell transfection compared with Lipid 93-S14, highlighting the improvements conferred by lipid structural modifications.

[1444] FIG. 45C illustrates the proportion of additional splenic immune cell populations expressing tdTomato with Lipids 27 and 26 from Table 10a (mean+std. dev., n=3), which also include NK cells (NKp46+, TCR-B-), classical monocytes (CD11b+, Ly-6G-, Ly-6C_hi), nonclassical monocytes (CD11b+, Ly-6G-, Ly-6C_lo), neutrophils (CD11b+, Ly-6G+), and dendritic cells (CD 11c+, MHC-II+). These experiments demonstrate that LNPs made with Lipids 27 and 26 from Table 10a and Lipid 15 from Table 10b are effective at delivering circular RNAs to many splenic immune cell subsets in mice and lead to successful protein expression from the circular RNA in those cells.

### Example 47

### Example 47A: Built-In polyA Sequences and Affinity-Purification to Produce Immue-Silent Circular RNA

[1445] PolyA sequences (20-30 nt) were inserted into the 5′ and 3′ ends of the RNA construct (precursor RNA with built-in polyA sequences in the introns). Precursor RNA and introns can alternatively be polyadenylated post-transcriptionally using, e.g., E. coli. polyA polymerase or yeast polyA polymerase, which requires the use of an additional enzyme.

[1446] Circular RNA in this example was circularized by in vitro transcription (IVT) and affinity-purified by washing over a commercially available oligo-dT resin to selectively remove polyA-tagged sequences (including free introns and precursor RNA) from the splicing reaction. The IVT was performed with a commercial IVT kit (New England Biolabs) or a customerized IVT mix (Orna Therapeutics), containing guanosine monophosphate (GMP) and guanosine triphosphate (GTP) at different ratios (GMP:GTP=8, 12.5, or 13.75). In some embodiments, GMP at a high GMP:GTP ratio may be preferentially included as the first nucleotide, yielding a majority of monophosphate-capped precursor RNAs. As a comparison, the circular RNA product was alternatively purified by the treatment with Xrn1, Rnase R, and Dnase I (enzyme purification).

[1447] Immunogenicity of the circular RNAs prepared using the affinity purification or enzyme purification process were then assessed. Briefly, the prepared circular RNAs were transfected into A549 cells. After 24 hours, the cells were lysed and interferon beta-1 induction relative to mock samples was measured by qPCR. 3p-hpRNA, a triphosphorylated RNA, was used as a positive control.

[1448] FIGS. 46B and 46C show that the negative selection affinity purification removes non-circular products from splicing reactions when polyA sequences are included on elements that are removed during splicing and present in unspliced precursor molecules. FIG. 46D shows circular RNAs prepared with tested IVT conditions and purification methods are all immunoquiescent. These results suggest the negative selection affinity purification is equivalent or superior to enzyme purification for circular RNA purification and that customized circular RNA synthesis conditions (IVT conditions) may reduce the reliance on GMP excess to achieve maximal immunoquiescence.

### Example 47B: Dedicated Binding Site and Affinity-Purification for Circular RNA Production

[1449] Instead of polyA tags, one can include specifically design sequences (DBS, dedicated binding site).

[1450] Instead of a polyA tag, a dedicated binding site (DBS), such as a specifically designed complementary oligonucleotide that can bind to a resin, may be used to selectively deplete precursor RNA and free introns. In this example, DBS sequences (30 nt) were inserted into the 5′ and 3′ ends of the precursor RNA. RNA was transcribed and the transcribed product was washed over a custom complementary oligonucleotide linked to a resin.

[1451] FIGS. 47B and 47C demonstrates that including the designed DBS sequence in elements that are removed during splicing enables the removal of unspliced precursor RNA and free intron components in a splicing reaction, via negative affinity purification.

### Example 47C: Production of a Circular RNA Encoding Dystrophin

[1452] A 12 kb12,000 nt circular RNA encoding dystrophin was produced by in vitro transcription of RNA precursors followed by enzyme purification using a mixture of Xrn1, DNase 1, and RNase R to degrade remaining linear components. FIG. 48 shows that the circular RNA encoding dystrophin was successfully produced.

### Example 48

### 5′ Spacer Between 3′ Intron Fragment and the IRES Improves Circular RNA Expression

[1453] Expression level of purified circRNAs with different 5′ spacers between the 3′ intron fragment and the IRES in Jurkat cells were compared. Briefly, luminescence from secreted Gaussia luciferase in supernatant was measured 24 hours after electroporation of 60,000 cells with 250 ng of each RNA.

[1454] Additionally, stability of purified circRNAs with different 5′ spacers between the 3′ intron fragment and the IRES in Jurkat cells were compared. Briefly, luminescence from secreted Gaussia luciferase in supernatant was measured over 2 days after electroporation of 60,000 cells with 250 ng of each RNA and normalized to day 1 expression.

[1455] The results are shown in FIGS. 49A and 49B, indicating that adding a spacer can enhance IRES function and the importance of sequence identity and length of the added spacer. A potential explanation is that the spacer is added right before the IRES and likely functions by allowing the IRES to fold in isolation from other structured elements such as the intron fragments.

### Example 49

[1456] This example describes deletion scanning from 5′ or 3′ end of the caprine kobuvirus IRES. IRES borders are generally poorly characterized and require empirical analysis, and this example can be used for locating the core functional sequences required for driving translation. Briefly, circular RNA constructs were generated with truncated IRES elements operably linked to a Gaussia luciferase coding sequence. The truncated IRES elements had nucleotide sequences of the indicated lengths removed from the 5′ or 3′ end. Luminescence from secreted Gaussia luciferase in supernatant was measured 24 and 48 hours after electroporation of primary human T cells with RNA. Stability of expression was calculated as the ratio of the expression level at the 48-hour time point relative to that at the 24-hour time point.

[1457] As shown in FIG. 50, deletion of more than 40 nucleotides from the 5′ end of the IRES reduced expression and disrupted IRES function. Stability of expression was relatively unaffected by the truncation of the IRES element but expression level was substantially reduced by deletion of 141 nucleotides from the 3′ end of the IRES, whereas deletion of 57 or 122 nucleotides from the 3′ end had a positive impact on the expression level.

[1458] It was also observed that deletion of the 6-nucleotide pre-start sequence reduced the expression level of the luciferase reporter. Replacement of the 6-nucleotide sequence with a classical kozak sequence (GCCACC) did not have a significant impact but at least maintained expression.

### Example 50

[1459] This example describes modifications (e.g., truncations) of selected IRES sequences, including Caprine Kobuvirus (CKV) IRES, Parabovirus IRES, Apodemus Picornavirus (AP) IRES, Kobuvirus SZAL6 IRES, Crohivirus B (CrVB) IRES, CVB3 IRES, and SAFV IRES. The sequences of the IRES elements are provided in SEQ ID NOs: 348-389. Briefly, circular RNA constructs were generated with truncated IRES elements operably linked to a Gaussia luciferase coding sequence. HepG2 cells were transfected with the circular RNAs. Luminescence in the supernatant was assessed 24 and 48 hours after transfection. Stability of expression was calculated as the ratio of the expression level at the 48-hour time point relative to that at the 24-hour time point.

[1460] As shown in FIG. 51, truncations had variable effects depending on the identity of the IRES, which may depend on the initiation mechanism and protein factors used for translation, which often differs between IRESs. 5′ and 3′ deletions can be effectively combined, for example, in the context of CKV IRES. Addition of a canonical Kozak sequence in some cases significantly improved expression (as in SAFV, Full vs Full+K) or diminished expression (as in CKV, 5d40/3d122 vs 5d40/3d122+K).

### Example 51

[1461] This example describes modifications of CK-739, AP-748, and PV-743 IRES sequences, including mutations altative translation initiation sites. Briefly, circular RNA constructs were generated with modified IRES elements operably linked to a Gaussia luciferase coding sequence. Luminescence from secreted Gaussia luciferase in supernatant was measured 24 and 48 hours after transfection of 1C1C7 cells with RNA.

[1462] CUG was the most commonly found alternative start site but many others were also characterized. These triplets can be present in the IRES scanning tract prior to the start codon and can affect translation of correct polypeptides. Four alternative start site mutations were created, with the IRES sequnces provided in SEQ ID NOs: 378-380. As shown in FIG. 52, mutations of alternative translation initiation sites in the CK-739 IRES affected translation of correct polypeptides, positively in some instances and negatively in other instances. Mutation of all the alternative translation initiation sites reduced the level of translation.

[1463] Alternative Kozak sequences, 6 nucleotides before start codon, can also affect expression levels. The 6-nucleotide sequence upstream of the start codon were gTcacG, aaagtc, gTcacG, gtcatg, gcaaac, and acaacc, respectively, in CK-739 IRES and Sample Nos. 1-5 in the “6 nt Pre-Start” group. As shown in FIG. 52, substitution of certain 6-nucleotide sequences prior to the start codon affected translation.

[1464] It was also observed that 5′ and 3′ terminal deletions in AP-748 and PV-743 IRES sequences reduced expression. However, in the CK-739 IRES, which had a long scanning tract, translation was relatively unaffected by deletions in the scanning tract.

### Example 52

[1465] This example describes modifications of selected IRES sequences by inserting 5′ and/or 3′ untranslated regions (UTRs) and creating IRES hybrids. Briefly, circular RNA constructs were generated with modified IRES elements operably linked to a Gaussia luciferase coding sequence. Luminescence from secreted Gaussia luciferase in supernatant was measured 24 and 48 hours after transfection of HepG2 cells with RNA.

[1466] IRES sequences with UTRs inserted are provided in SEQ ID NOs: 390-401. As shown in FIG. 53, insertion of 5′ UTR right after the 3′ end of the IRES and before the start codon slightly increased the translation from Caprine Kobuvirus (CK) IRES but in some instances abrogated translation from Salivirus SZ1 IRES. Insertion of 3′ UTR right after the stop cassette had no impact on both IRES sequences.

[1467] Hybrid CK IRES sequences are provided in SEQ ID NOs: 390-401. CK IRES was used as a base, and specific regions of the CK IRES were replaced with similar-looking structures from other IRES sequences, for example, SZ1 and AV (Aichivirus). As shown in FIG. 53, certain hybrid synthetic IRES sequences were functional, indicating that hybrid IRES can be constructed using parts from distinct IRES sequences that show similar predicted structures while deleting these structures completely abrogates IRES function.

### Example 53

[1468] This example describes modifications of circular RNAs by introducing stop codon or cassette variants. Briefly, circular RNA constructs were generated with IRES elements operably linked to a Gaussia luciferase coding sequence followed by variable stop codon cassettes, which included a stop codon in each frame and two stop codons in the reading frame of the Gaussia luciferase coding sequence. 1C1C7 cells were transfected with the circular RNAs. Luminescence in supernatant was assessed 24 and 48 hours after transfection.

[1469] The sequences of the stop codon cassettes are set forth in SEQ ID NOs: 406-412. As shown in FIG. 54, certain stop codon cassettes improved expression levels, although they had little impact on expression stability. In particular, a stop cassette with two frame 1 (the reading frame of the Gaussia luciferase coding sequence) stop codons, the first being TAA, followed by a frame 2 stop codon and a frame 3 stop codon, is effective for promoting functional translation.

### Example 54

[1470] This example describes modifications of circular RNAs by inserting 5′ UTR variants. Briefly, circular RNA constructs were generated with IRES elements with 5′ UTR variants inserted between the 3′ end of the IRES and the start codon, the IRES being operably linked to a Gaussia luciferase coding sequence. 1C1C7 cells were transfected with the circular RNAs. Luminescence in supernatant was assessed 24 and 48 hours after transfection.

[1471] The sequences of the 5′ UTR variants are set forth in SEQ ID NOs: 402-405. As shown in FIG. 55, a CK IRES with a canonical Kozak sequence (UTR4) was more effective when a 36-nucleotide unstructured/low GC spacer sequence was added (UTR2), suggesting that the GC-rich Kozak sequences may interfere with core IRES folding. Using a higher-GC/structured spacer with a kozak sequence did not show the same benefit (UTR3), possibly due to interference with IRES folding by the spacer itself. Mutating the kozak sequence to gTcacG (UTR1) enhanced translation to the same level as the Kozak+spacer alternative without the need for a spacer.

### Example 55

[1472] This example describes the impact of miRNA target sites in circular RNAs on expression levels. Briefly, circular RNA constructs were generated with IRES elements operably linked to a human erythropoietin (hEPO) coding sequence, where 2 tandem miR-122 target sites were inserted into the construct. miR-122-expressing Huh7 cells were transfected with the circular RNAs. hEPO expression in supernatant was assessed 24 and 48 hours after transfection by sandwich ELISA.

[1473] As shown in FIG. 56, the hEPO expression level was obrogated where the miR-122 target sites were inserted into the circular RNA. This result demonstrates that expression from circular RNA can be regulated by miRNA. As such, cell type- or tissue-specific expression can be achieved by incorporating target sites of the miRNAs expressed in the cell types in which expression of the recombinant protein is undesirable.

### Example 56

### Example 56A: Expression of Two Proteins from One circRNA Containing a 2A Site and Functional RNA Stability

[1474] Constructs including Anabaena intron/exon regions, varying IRES, a first expression sequence encoding Gaussia luciferase, a 2A self-cleaving peptide, and a second expression sequence encoding GFP or EGFP are circularized. 20,000-40,000 293 cells are transfected with 40 ng of circRNA. Luminescence from secreted Gaussia luciferase in supernatant is measured every 24 hours after transfection with complete media replacements at each time point. Fluorescence from expressed GFP or EGFP is measured 24 hours after transfection.

### Example 56B: Expression of Two Proteins from One circRNA Containing 2 IRES Sequences and Functional RNA Stability

[1475] Constructs including Anabaena intron/exon regions, a first IRES, a first expression sequence encoding Gaussia luciferase, optionally a spacer, a second IRES, and a second expression sequence encoding GFP or EGFP, with the first and/or second IRES varying by construct are circularized. 293 cells are electroporated with 1 μg of each circularization reaction. Luminescence/fluorescence from secreted Gaussia luciferase and GFP or EGFP in supernatant is measured 24 hours after electroporation. Functional stability of the IRES constructs in each round of electroporated 293 cells is measured over 3 days. Luminescence/fluorescence from secreted Gaussia luciferase and GFP or EGFP in supernatant is measured every 24 hours after electroporation of cells with 1 μg of each circularization reaction, followed by complete media replacement.

### Example 57

### Expression and Functional Stability of Circular and Linear RNA Containing 2 Expression Sequences Separated by a Cleavage Site

[1476] Constructs including Anabaena intron/exon regions, a first expression sequence encoding Gaussia luciferase, a 2A self-cleaving peptide, an expression sequence encoding GFP or EGFP is circularized. mRNA encoding a first expression sequence encoding Gaussia luciferase, a 2A self-cleaving peptide, a second expression sequence encoding EGFP, a ˜150 nt polyA tail, and modified to replace 100% of uridine with 1-methyl pseudouridine is produced. Expression of circular and modified mRNA is measured in 293 cells. Luminescence/fluorescence from secreted Gaussia luciferase and GFP or EGFP in supernatant is measured 24 hours after electroporation of cells with 1 μg of each RNA species. Luminescence/fluorescence from secreted Gaussia luciferase and GFP or EGFP in supernatant is measured every 24 hours after electroporation over 3 days in order to compare construct functional stability.

### Example 58

### Example 58A: Comparison of Expression and Functional Stability of Dual Expression with Single Expression Constructs

[1477] A construct including an Anabaena intron/exon region, an IRES, a Gaussia luciferase expression sequence, a 2A self-cleaving peptide, and an GFP or EGFP expression sequence is circularized. Constructs containing a single expression sequence (encoding Gaussia luciferase or GFP or EGFP) are also circularized. Linear constructs containing a single expression sequence (encoding Gaussia luciferase or GFP or EGFP) are also generated. 293 cells are electroporated with 1 μg of each circularization reaction or an equivalent amount of linear RNA. Fluorescence from secreted Gaussia luciferase and GFP or EGFP positivity in supernatant is measured 24 hours after electroporation.

[1478] Functional stability of the constructs in each round of electroporated 293 cells is measured over 3 days. Luminescence from secreted Gaussia luciferase in supernatant is measured every 24 hours after electroporation of cells with 1 μg of each circularization reaction or equivalent mRNA, followed by complete media replacement.

### Example 58B: Comparison of Expression and Functional Stability of Dual Expression with Single Expression Constructs

[1479] A construct including an Anabaena intron/exon region, a first IRES, a Gaussia luciferase expression sequence, a second IRES, and an GFP or EGFP expression sequence is circularized. Constructs containing a single expression sequence (encoding Gaussia luciferase or GFP or EGFP) are also circularized. Linear constructs containing a single expression sequence (encoding Gaussia luciferase or GFP or EGFP) are also generated. 293 cells are electroporated with 1 μg of each circularization reaction or an equivalent amount of linear RNA. Fluorescence from secreted Gaussia luciferase and GFP or EGFP positivity in supernatant is measured 24 hours after electroporation.

[1480] Functional stability of the constructs in each round of electroporated 293 cells is measured over 3 days. Luminescence from secreted Gaussia luciferase in supernatant is measured every 24 hours after electroporation of cells with 1 μg of each circularization reaction or equivalent mRNA, followed by complete media replacement.

### Example 59

### Example 59A: Functional Interaction Between TCR Payloads Expressed Using an IRES and a Cleavage Site

[1481] Constructs including Anabaena intron/exon regions, an IRES, a TCR alpha chain expression sequence, a 2A self-cleaving peptide, and a TCR beta chain expression sequence are circularized.

[1482] Human primary CD3+ T cells are electroporated with the circRNA and co-cultured for 24 hours with cells stably expressing the TCR target, GFP and firefly luciferase. Human primary CD3+ T cells are mock electroporated and co-cultured as a control. Quantification of specific lysis of target cells is determined by detection of firefly luminescence. % Specific lysis defined as 1−[TCR condition luminescence]/[mock condition luminescence].

### Example 59B: Functional Interaction Between TCR Payloads Expressed Using 2 IRES

[1483] Constructs including Anabaena intron/exon regions, a first IRES, a TCR alpha chain expression sequence, optionally a spacer, a second IRES, and a TCR beta chain expression sequence are circularized.

[1484] Human primary CD3+ T cells are electroporated with the circRNA and co-cultured for 24 hours with cells stably expressing the TCR target, GFP and firefly luciferase. Human primary CD3+ T cells are mock electroporated and co-cultured as a control. Quantification of specific lysis of target cells is determined by detection of firefly luminescence. % Specific lysis defined as 1−[TCR condition luminescence]/[mock condition luminescence].

### Example 60

### Example 60A: CAR Payloads Expressed Using an IRES and a Cleavage Site

[1485] Constructs including Anabaena intron/exon regions, an IRES, an anti-CD19 CAR expression sequence, a 2A self-cleaving peptide, and an anti-C20 CAR expression sequence are circularized.

[1486] Human primary CD3+ T cells are electroporated with the circRNA and co-cultured for 24 hours with cells stably expressing the both CAR targets, GFP and firefly luciferase. Human primary CD3+ T cells are mock electroporated and co-cultured as a control. Quantification of specific lysis of target cells is determined by detection of firefly luminescence. % Specific lysis defined as 1−[TCR condition luminescence]/[mock condition luminescence].

### Example 60B: TCR Payloads Expressed Using 2 IRES

[1487] Constructs including Anabaena intron/exon regions, a first IRES, an anti-CD19 CAR expression sequence, optionally a spacer, a second IRES, and an anti-CD20 CAR expression sequence are circularized.

[1488] Human primary CD3+ T cells are electroporated with the circRNA and co-cultured for 24 hours with cells stably expressing both CAR targets, GFP and firefly luciferase. Human primary CD3+ T cells are mock electroporated and co-cultured as a control. Quantification of specific lysis of target cells is determined by detection of firefly luminescence. % Specific lysis defined as 1−[TCR condition luminescence]/[mock condition luminescence].

### Example 61

### LNP and Circular RNA Construct Containing Anti-CD19 CAR Reduces B Cells in the Blood and Spleen In Vivo

[1489] Circular RNA constructs encoding an anti-CD19 CAR expression were encapsulated within lipid nanoparticles as described above. For comparison, circular RNAs encoding luciferase expression were encapsulated within separate lipid nanoparticle.

[1490] C57BL/6 mice at 6 to 8 weeks old were injected with either LNP solution every other day for a total of 4 LNP injections within each mouse. 24 hours after the last LNP injection, the mice's spleen and blood were harvested, stained, and analyzed via flow cytometry. As shown in FIG. 57A and FIG. 57B, mice containing LNP-circular RNA constructs encoding an anti-CD19 CAR led to a statistically significant reduction in CD19+ B cells in the peripheral blood and spleen compared to mice treated with LNP-circular RNA encoding a luciferase.

### Example 62

### IRES Sequences Contained within Circular RNA Encoding CARs Improves CAR Expressions and Cytotoxicity of T-Cells

[1491] Activated murine T-cells were electroporated with 200 ng of circular RNA constructs containing a unique IRES and a murine anti-CD19 1D3ζ CAR expression sequence. The IRES contained in these constructs were derived either in whole or in part from a Caprine Kobuvirus, Apodemus Picornavirus, Parabovirus, or Salivirus. A Caprine Kobuvirus derived IRES was additionally codon optimized. As a control, a circular RNA containing a wild-type zeta mouse CAR with no IRES was used for comparison. The T-cells were stained for the CD-19 CAR 24 hours post electroporation to evaluate for surface expression and then co-cultured with A20 Fluc target cells. The assay was then evaluated for cytotoxic killing of the Fluc+A20 cells 24 hours after co-culture of the T-cells with the target cells.

[1492] As seen in FIGS. 58A, 58B, 58C, and 59, the unique IRES were able to increase the frequency that the T-cells expressed the CAR protein and level of CAR expression on the surface of the cells. The increase frequency of expression of the CAR protein and level of CAR expression on the surface of cells lead to an improved anti-tumor response.

### Example 63

### Cytosolic and Surface Proteins Expressed from Circular RNA Construct in Primary Human T-Cells

[1493] Circular RNA construct contained either a sequence encoding for a fluorescent cytosolic reporter or a surface antigen reporter. Fluorescent reporters included green fluorescent protein, mCitrine, mWasabi, Tsapphire. Surface reporters included CD52 and Thy1.1^{bio} Primary human T-cells were activated with an anti-CD3/anti-CD28 antibody and electroporated 6 days post activation of the circular RNA containing a reporter sequence. T-cells were harvested and analyzed via flow cytometry 24 hours post electroporation. Surface antigens were stained with commercially available antibodies (e.g., Biolegend, Miltenyi, and BD).

[1494] As seen in FIG. 60A and FIG. 60B, cytosolic and surface proteins can be expressed from circular RNA encoding the proteins in primary human T-cells.

### Example 64

### Circular RNAs Containing Unique IRES Sequences have Improved Translation Expression Over Linear mRNA

[1495] Circular RNA constructs contained a unique IRES along with an expression sequence for Firefly luciferase (FLuc).

[1496] Human T-cells from 2 donors were enriched and stimulated with anti-CD3/anti-CD28 antibodies. After several days of proliferation, activated T cells were harvested and electroporated with equal molar of either mRNA or circular RNA expressing FLuc payloads. Various IRES sequences, including those derived from Caprine Kobuvirus, Apodemus Picornavirus, and Parabovirus, were studied to evaluate expression level and durability of the payload expression across 7 days. Across the 7 days, the T-cells were lysed with Promega Brightglo to evaluate for bioluminsences.

[1497] As shown in FIGS. 61C, 61D, 61E, 61F, and 61G, the presence of an IRES within a circular RNA can increase translation and expression of a cytosolic protein by orders of magnitude and can improve expression compared to linear mRNA. This was found consistent across multiple human T-cell donors.

### Example 65

### Example 65A: LNP-Circular RNA Encoding Anti-CD19 Mediates Human T-Cell Killing of K562 Cells

[1498] Circular RNA constructs contained a sequence encoding for anti-CD19 antibodies. Circular RNA constructs were then encapsulated within a lipid nanoparticle (LNP).

[1499] Human T-cells were stimulated with anti-CD3/anti-CD28 and left to proliferate up to 6 says. At day 6, LNP-circular RNA and ApoE3 (1 μg/mL) were co-cultured with the T-cells to mediate transfection. 24 hours later, Fluc+ K562 cells were electroporated with 200 ng of circular RNA encoding anti-CD19 antibodies and were later co-cultured at day 7. 48 hours post co-culture, the assay was assessed for CAR expression and cytotoxic killing of K562 cells through Fluc expression.

[1500] As shown in FIG. 62A and FIG. 62B, there is T-cell expression of anti-CD19 CAR from the LNP-mediated delivery of a CAR in vitro to T-cells and its capability to lyse tumor cells in a specific, antigen dependent manner in engineered K562 cells.

### Example 65B: LNP-Circular RNA Encoding Anti-BCMA Antibody Mediates Human T-Cell Killing of K562 Cells

[1501] Circular RNA constructs contained a sequence encoding for anti-BCMA antibodies. Circular RNA constructs were then encapsulated within a lipid nanoparticle (LNP).

[1502] Human T-cells were stimulated with anti-CD3/anti-CD28 and left to proliferate up to 6 says. At day 6, LNP-circular RNA and ApoE3 (1 μg/mL) were co-cultured with the T-cells to mediate transfection. 24 hours later, Fluc+ K562 cells were electroporated with 200 ng of circular RNA encoding anti-BCMA antibodies and were later co-cultured at day 7. 48 hours post co-culture, the assay was assessed for CAR expression and cytotoxic killing of K562 cells through Fluc expression.

[1503] As shown in FIG. 62B, there is T-cell expression of BCMA CAR from the LNP-mediated delivery of a CAR in vitro to T-cells and its capability to lyse tumor cells in a specific, antigen dependent manner in engineered K562 cells.

### Example 66

### Anti-CD19 CAR T-Cells Exhibit Anti-Tumor Activity In Vitro

[1504] Human T-cells were activated with anti-CD3/anti-CD28 and electroporated once with 200 ng of anti-CD19 CAR-expressing circular RNA. Electroporated T-cells were co-cultured with FLuc+ Nalm6 target cells and non-target Fluc+K562 cells to evaluate CAR-mediated killing. After 24 hours post co-culture, the T-cells were lysed and examined for remanent FLuc expression by target and non-target cells to evaluate expression and stability of expression across 8 days total.

[1505] As shown in FIGS. 63A and 63B, T-cells express circular RNA CAR constructs in specific, antigen-dependent manner. Results also shows improved cytotoxicity of circular RNAs encoding CARs compared to linear mRNA encoding CARs and delivery of a functional surface receptor.

### Example 67

### Effective LNP Transfection of Circular RNA Mediated with ApoE3

[1506] Human T-cells were stimulated with anti-CD3/anti-CD28 and left to proliferate up to 6 days. At day 6, lipid nanoparticle (LNP) was and circular RNA expressing green fluorescence protein solution with or without ApoE3 (1 μg/mL) were co-cultured with the T-cells. 24 hours later, the T-cells were stained for live/dead T-cells and the live T-cells were analyzed for GFP expression on a flow cytometer.

[1507] As shown by FIGS. 64A, 64B, 61C, 61D, and 64E, efficient LNP transfection can be mediated by ApoE3 on activated T-cells, followed by significant payload expression. These results were exhibited across multiple donors.

### INCORPORATION BY REFERENCE

[1508] All publications, patents, and patent applications mentioned in this specification are herein incorporated by reference to the same extent as if each individual publication, patent, or patent application was specifically and individually indicated as being incorporated by reference herein.

1-126. (canceled)

127. A circular RNA polynucleotide comprising, in the following order, a post splicing 3′ group I intron fragment, a first Internal Ribosome Entry Site (IRES), a first expression sequence, a second expression sequence, and a post splicing 5′ group I intron fragment.

128. The circular RNA polynucleotide of claim 127, further comprising a second IRES between the first expression sequence and the second expression sequence.

129. The circular RNA polynucleotide of claim 127, further comprising a cleavage site between the first expression sequence and the second expression sequence.

130. The circular RNA polynucleotide of claim 129, wherein the cleavage site is a self-cleaving spacer or a 2A self-cleaving peptide.

131. The circular RNA polynucleotide of claim 127, wherein the first IRES and/or the second IRES consists of or comprises a sequence according to any of SEQ ID NO: 1-72.

132. The circular RNA polynucleotide of claim 127, wherein the first expression sequence encodes a first therapeutic protein, and the second expression sequence encodes a second therapeutic protein.

133. The circular RNA polynucleotide of claim 132, wherein the first expression sequence or the second expression sequence encodes a chimeric antigen receptor (CAR), an antibody, a transcription factor, a cytokine, an immune inhibitory molecule, an agonist of a costimulatory molecule, or an inhibitor of an immune checkpoint molecule.

134. The circular RNA polynucleotide of claim 127, wherein:
a. the first expression sequence encodes an alpha chain of a T cell receptor (TCR) and the second expression sequence encodes a beta chain of a TCR;
b. the first expression sequence encodes a beta chain of a TCR and the second expression sequence encodes an alpha chain of a TCR;
c. the first expression sequence encodes a gamma chain of a TCR and the second expression sequence encodes a delta chain of a TCR;
d. the first expression sequence encodes a delta chain of a TCR and the second expression sequence encodes a gamma chain of a TCR;
e. the first expression sequence encodes a TCR, and the second expression sequence encodes a cytokine; or
f. the first expression sequence encodes a cytokine, and the second expression sequence encodes a TCR;
g. the first expression sequence encodes a TCR, and the second expression sequence encodes a chemokine;
h. the first expression sequence encodes for a chemokine, and the second expression sequence encodes for a TCR;
i. the first expression sequence encodes for a TCR, and the second expression sequence encodes for a transcription factor;
j. the first expression sequence encodes for a transcription factor, and the second expression sequence encodes for a TCR;
k. the first expression sequence encodes a CAR, and the second expression sequence encodes a PD1 or PDL1 antagonist;
l. the first expression sequence encodes a PD1 or PDL1 antagonist and the second expression sequence encodes a CAR;
m. the first expression sequence encodes a CAR, and the second expression sequence encodes a cytokine;
n. the first expression sequence encodes a cytokine, and the second expression sequence encodes a CAR;
o. the first expression sequence encodes for a CAR, and the second expression sequence encodes a chemokine;
p. the first expression sequence encodes for a chemokine, and the second expression sequence encodes for a CAR;
q. the first expression sequence encodes a transcription factor, and the second expression sequence encodes a cytokine;
r. the first expression sequence encodes a cytokine, and the second expression sequence encodes a transcription factor;
s. the first expression sequence encodes a transcription factor, and the second expression sequence encodes a chemokine; or
t. the first expression sequence encodes a chemokine, and the second expression sequence encodes a transcription factor.

135. The circular RNA polynucleotide of claim 134, wherein:
a. the cytokine is selected from IL-2, IL-7, IL-12, IL-15, IL-10, IL-12, and TGFβ;
b. the transcription factor is selected from FOXP3, STAT5B, HELIOS, Tbet, GATA3, RORgt, and CD25; and/or
c. the chemokine is selected from a CC chemokine, CXC chemokine, C chemokine, CX3C chemokine, CCL1, CCL2, CCL3, CCL4, CCL5, CCL6, CCL7, CCL8, CCL9/CCL10, CCL11, CCL12, CCL13, CCL14, CCL15, CCL16, CCL17, CCL18, CCL19, CCL20, CCL21, CCL22, CCL23, CCL24, CCL25, CCL26, CCL27, CCL28, CXCL1, CXCL2, CXCL3, CXCL4, CXCL5, CXLC6, CXCL7, CXCL8, CXCL9, CXCL10, CXCL11, CXCL12, CXCL13, CXCL14, CXCL15, CXCL16, CXCL17, XCL1, XCL2, and CX3CL1.

136. The circular RNA polynucleotide of claim 127, wherein:
a. the first expression sequence encodes a tumor antigen, and the second expression sequence encodes a cytokine;
b. the first expression sequence encodes a cytokine, and the second expression sequence encodes a tumor antigen;
c. the first expression sequence encodes a CAR, and the second expression sequence encodes a CAR;
d. the first expression sequence encodes a cytokine, and the second expression sequence encodes a cytokine;
e. the first expression sequence encodes a TCR, and the second expression sequence encodes a TCR;
f. first expression sequence encodes for a chemokine, and the second expression sequence encodes for a chemokine;
g. the first expression sequence or second expression sequence encodes for an immunosuppressive enzyme;
h. the first expression sequence encodes a rate-limiting enzyme, and the second expression sequence encodes a flux-limiting enzyme;
i. the first expression sequence encodes a flux-limiting enzyme, and the second expression sequence encodes a rate-limiting enzyme;
j. the first expression sequence encodes a transcription factor, and the second expression sequence encodes a survival factor;
k. the first expression sequence encodes a survival factor, and the second expression sequence encodes a transcription factor;
l. the first expression sequence or second expression sequence encodes a chaperone protein or complex;
m. the first expression sequence encodes a transcription factor, and the second expression sequence encodes a chaperone protein or complex;
n. the first expression sequence encodes a chaperone protein or complex, and the second expression sequence encodes for a transcription factor;
o. the first expression sequence and/or second expression sequences each independently encode a signaling protein;
p. the first expression sequence encodes for an enzyme, and the second expression encodes for a negative regulatory inhibitor of the first expression sequence;
q. the first expression sequence encodes for a negative regulatory inhibitor protein of an enzyme encoded in the second expression sequence;
r. the first expression sequence encodes a dominant negative protein, and the second expression sequence encodes an immune protein;
s. the first expression sequence encodes an immune protein, and the second expression sequence encodes a dominant negative protein;
t. the first expression sequence or second expression sequence encodes an anti-inflammatory protein;
u. the first expression sequence encodes a transcription factor, and the second expression sequence is capable of converting 5-fluorocytosinde (5-FC) into 5-fluorouracil (5-FU); or
v. the first expression sequence is capable of converting 5-FC into 5-FU, and the second expression sequence is a transcription factor.

137. The circular RNA polynucleotide of claim 136, wherein:
a. the tumor antigen is a neoantigen;
b. the cytokine is IFNγ, IL-2, IL-7, IL-15, IL-18, IL-10, TGFβ, or IL-35;
c. the transcription factor is selected from FOXP3, STAT5B, HELIOS, Tbet, GATA3, RORgt, and CD25;
d. the survival factor is BCL-XL;
e. the chaperone protein or complex is selected from Skp, Spy, FkpA, SurA, Hsp60, Hsp70, GroEL, GroES, Hsp90, HtpG, Hsp100, ClpA, ClpX, ClpP, and Hsp104;
f. the negative regulatory inhibitor is selected from a p57kip2, BAX inhibitor, and TIPE2; and/or
g. the expression sequence capable of converting 5-FC into 5-fluorouracil 5-FU is cytosine deaminase.

138. The circular RNA polynucleotide of claim 127, comprising, in the following order, a post splicing 3′ group I intron fragment, a 5′ duplex forming region, a first spacer, a first IRES, a first expression sequence, a second expression sequence, a second spacer, a 3′ duplex forming region, and a post splicing 5′ group I intron fragment.

139. The circular RNA polynucleotide of claim 138, wherein the first and second spacers each has a length of about 10 to about 60 nucleotides, or about 9 to about 19 nucleotides.

140. The circular RNA polynucleotide of claim 128, wherein the first IRES or second IRES has a sequence of an IRES from Taura syndrome virus, Triatoma virus, Theiler's encephalomyelitis virus, Simian Virus 40, Solenopsis invicta virus 1, Rhopalosiphum padi virus, Reticuloendotheliosis virus, Human poliovirus 1, Plautia stali intestine virus, Kashmir bee virus, Human rhinovirus 2, Homalodisca coagulata virus-1, Human Immunodeficiency Virus type 1, Homalodisca coagulata virus-1, Himetobi P virus, Hepatitis C virus, Hepatitis A virus, Hepatitis GB virus, Foot and mouth disease virus, Human enterovirus 71, Equine rhinitis virus, Ectropis obliqua picorna-like virus, Encephalomyocarditis virus, Drosophila C Virus, Human coxsackievirus B3, Crucifer tobamovirus, Cricket paralysis virus, Bovine viral diarrhea virus 1, Black Queen Cell Virus, Aphid lethal paralysis virus, Avian encephalomyelitis virus, Acute bee paralysis virus, Hibiscus chlorotic ringspot virus, Classical swine fever virus, Human FGF2, Human SFTPA1, Human AML1/RUNX1, Drosophila antennapedia, Human AQP4, Human AT1R, Human BAG-1, Human BCL2, Human BiP, Human c-IAPl, Human c-myc, Human eIF4G, Mouse NDST4L, Human LEF1, Mouse HIF1 alpha, Human n.myc, Mouse Gtx, Human p27kip1, Human PDGF2/c-sis, Human p53, Human Pim-1, Mouse Rbm3, Drosophila reaper, Canine Scamper, Drosophila Ubx, Human UNR, Mouse UtrA, Human VEGF-A, Human XIAP, Drosophila hairless, S. cerevisiae TFIID, S. cerevisiae YAP1, tobacco etch virus, turnip crinkle virus, EMCV-A, EMCV-B, EMCV-Bf, EMCV-Cf, EMCV pEC9, Picobirnavirus, HCV QC64, Human Cosavirus E/D, Human Cosavirus F, Human Cosavirus JMY, Rhinovirus NAT001, HRV14, HRV89, HRVC-02, HRV-A21, Salivirus A SH1, Salivirus FHB, Salivirus NG-J1, Human Parechovirus 1, Crohivirus B, Yc-3, Rosavirus M-7, Shanbavirus A, Pasivirus A, Pasivirus A2, Echovirus E14, Human Parechovirus 5, Aichi Virus, Hepatitis A Virus HA16, Phopivirus, CVA10, Enterovirus C, Enterovirus D, Enterovirus J, Human Pegivirus 2, GBV-C GT110, GBV-C K1737, GBV-C Iowa, Pegivirus A 1220, Pasivirus A3, Sapelovirus, Rosavirus B, Bakunsa Virus, Tremovirus A, Swine Pasivirus 1, PLV-CHN, Pasivirus A, Sicinivirus, Hepacivirus K, Hepacivirus A, BVDV1, Border Disease Virus, BVDV2, CSFV-PK15C, SF573 Dicistrovirus, Hubei Picorna-like Virus, CRPV, Salivirus A BN5, Salivirus A BN2, Salivirus A 02394, Salivirus A GUT, Salivirus A CH, Salivirus A SZ1, Salivirus FHB, CVB3, CVB1, Echovirus 7, CVB5, EVA71, CVA3, CVA12, EV24 or an aptamer to eIF4G.

141. The circular RNA polynucleotide of claim 127, wherein the circular RNA consists of natural nucleotides.

142. The circular RNA polynucleotide of claim 127, wherein the first expression sequence and/or the second expression sequence is codon optimized.

143. The circular RNA polynucleotide of claim 127, wherein the circular RNA is optimized to lack:
a. at least one microRNA binding site present in an equivalent pre-optimized polynucleotide;
b. at least one endonuclease-susceptible site present in an equivalent pre-optimized polynucleotide; and/or
c. at least one RNA-editing-susceptible site present in an equivalent pre-optimized polynucleotide.

144. The circular RNA polynucleotide of claim 127, wherein the circular RNA polynucleotide is from about 100 nucleotides to about 15 kilobases in length.

145. The circular RNA polynucleotide of claim 127, wherein the circular RNA polynucleotide has an in vivo duration of therapeutic effect in humans of at least about 20 hours and/or a functional half-life of at least about 20 hours.

146. The circular RNA polynucleotide of claim 127, wherein the circular RNA polynucleotide has:
a. a duration of therapeutic effect in a human cell greater than or equal to that of an equivalent linear RNA polynucleotide comprising the same expression sequence;
b. a functional half-life in a human cell greater than or equal to that of an equivalent linear RNA polynucleotide comprising the same expression sequence;
c. an in vivo duration of therapeutic effect in humans greater than that of an equivalent linear RNA polynucleotide having the same expression sequence; and/or
d. an in vivo functional half-life in humans greater than that of an equivalent linear RNA polynucleotide having the same expression sequence.

147. A pharmaceutical composition comprising a circular RNA polynucleotide of claim 127, and a nanoparticle.

148. The pharmaceutical composition of claim 147, comprising a targeting moiety operably connected to the nanoparticle.

149. The pharmaceutical composition of claim 147, wherein the nanoparticle is a lipid nanoparticle, a core-shell nanoparticle, a biodegradable nanoparticle, a biodegradable lipid nanoparticle, a polymer nanoparticle, or a biodegradable polymer nanoparticle.

150. The pharmaceutical composition of claim 148, wherein the targeting moiety mediates receptor-mediated endocytosis or direct fusion into selected cells of a selected cell population or tissue in the absence of cell isolation or purification.

151. The pharmaceutical composition of claim 148, wherein the targeting moiety is a scFv, nanobody, peptide, minibody, polynucleotide aptamer, heavy chain variable region, light chain variable region or fragment thereof.

152. The pharmaceutical composition of claim 147, wherein:
a. less than 1%, by weight, of the polynucleotides in the pharmaceutical composition are double stranded RNA, DNA splints, or triphosphorylated RNA; and/or
b. less than 1%, by weight, of the polynucleotides and proteins in the pharmaceutical composition are double stranded RNA, DNA splints, triphosphorylated RNA, phosphatase proteins, protein ligases, and capping enzymes.

153. The pharmaceutical composition of claim 147, wherein the nanoparticle comprises:
a. one or more cationic lipids, ionizable lipids, or poly β-amino esters;
b. one or more non-cationic lipids;
c. one or more PEG-modified, polyglutamic acid lipids, or hyaluronic acid lipids;
d. cholesterol; and/or
e. arachidonic acid or oleic acid.

154. The pharmaceutical composition of claim 147, wherein the nanoparticle comprises more than one circular RNA polynucleotide.

155. A method of treating a cancer and/or an immune disorder using the RNA polynucleotide of claim 127.

156. The method of claim 155, wherein:
a. the cancer is selected from the group consisting of acute lymphocytic leukemia; acute myeloid leukemia (AML); alveolar rhabdomyosarcoma; B cell malignancies; bladder cancer; bone cancer; brain cancer; breast cancer; cancer of the anus, anal canal, or anorectum; cancer of the eye; cancer of the intrahepatic bile duct; cancer of the joints; cancer of the neck; gallbladder cancer; cancer of the pleura; cancer of the nose, nasal cavity, or middle ear; cancer of the oral cavity; cancer of the vulva; chronic lymphocytic leukemia; chronic myeloid cancer; colon cancer; esophageal cancer, cervical cancer; fibrosarcoma; gastrointestinal carcinoid tumor; head and neck cancer; Hodgkin lymphoma; hypopharynx cancer; kidney cancer; larynx cancer; leukemia; liquid tumors; liver cancer; lung cancer; lymphoma; mesothelioma; mastocytoma; melanoma; multiple myeloma; nasopharynx cancer; non-Hodgkin lymphoma; B-chronic lymphocytic leukemia; hairy cell leukemia; acute lymphocytic leukemia (ALL); Burkitt's lymphoma; ovarian cancer; pancreatic cancer; cancer of the peritoneum; cancer of the omentum; mesentery cancer; pharynx cancer; prostate cancer; rectal cancer; renal cancer; skin cancer; small intestine cancer; soft tissue cancer; solid tumors; synovial sarcoma; gastric cancer; testicular cancer; thyroid cancer; and ureter cancer; and/or
b. the autoimmune disorder is selected from scleroderma, Grave's disease, Crohn's disease, Sjogren's disease, multiple sclerosis, Hashimoto's disease, psoriasis, myasthenia gravis, autoimmune polyendocrinopathy syndromes, Type I diabetes mellitus (TIDM), autoimmune gastritis, autoimmune uveoretinitis, polymyositis, colitis, thyroiditis, and the generalized autoimmune diseases typified by human Lupus.

157. A vector for making a circular RNA polynucleotide, comprising, in the following order, a 3′ Group I intron fragment, 5′ duplex forming region, an Internal Ribosome Entry Site (IRES), a first expression sequence, a second expression sequence, a 3′ duplex forming region, and a 5′ Group I intron fragment.

158. The vector of claim 157, comprising:
a. a polynucleotide sequence encoding a cleavage site between the first expression sequence and the second expression sequence; and/or
b. a first spacer between the 5′ duplex forming region and the IRES, and a second spacer between the second expression sequence and the 3′ duplex forming region.

159. A eukaryotic cell comprising a circular RNA polynucleotide according to claim 127.

160. The eukaryotic cell of claim 159, wherein the eukaryotic cell is an immune cell.

The application's sequence listing, which the Patent Office published only in electronic form, follows.

SEQUENCE LISTING (793 sequences)

SEQ ID NO: 1 - DNA, 585 bp, Unknown
  source: /note="Description of Unknown: Encephalomyocarditis virus sequence"
cccccctctccctccccccctaacgttactggccgaagccgcttggaataaggccggtgtgcgtttgtctatatgttattttccaccatattgccgtcttttggcaatgtgagggcccggaaacctggccctgtcttcttgacgagcattcctaggggtctttcccctctcgccaaaggaatgcaaggtctgttgaatgtcgtgaaggaagcagttcctctggaagcttcttgaagacaaacaacgtctgtagcgaccctttgcaggcagcggaaccccccacctggcgacaggtgcctctgcggccaaaagccacgtgtataagatacacctgcaaaggcggcacaaccccagtgccacgttgtgagttggatagttgtggaaagagtcaaatggctctcctcaagcgtattcaacaaggggctgaaggatgcccagaaggtaccccattgtatgggatctgatctggggcctcggtgcacatgctttacatgtgtttagtcgaggttaaaaaacgtctaggccccccgaaccacggggacgtggttttcctttgaaaaacacgatgataatatggccacaacc

SEQ ID NO: 2 - DNA, 568 bp, Unknown
  source: /note="Description of Unknown: Encephalomyocarditis virus sequence"
ctccccctccccccccttactatactggccgaagccacttggaataaggccggtgtgcgtttgtctacatgctattttctaccgcattaccgtcttatggtaatgtgagggtccagaacctgaccctgtcttcttgacgaacactcctaggggtctttcccctctcgacaaaggagtgtaaggtctgttgaatgtcgtgaaggaagcagttcctctggaagcttcttaaagacaaacaacgtctgtagcgaccctttgcaggcagcggaaccccccacctggtgacaggtgcctctgcggccaaaagccacgtgtataagatacacctgcaaaggcggcacaaccccagtgccacgttgtgagttggatagttgtggaaagagtcaaatggctctcctcaagcgtattcaacaaggggctgaaggatgcccagaaggtaccccattgtatgggatctgatctggggcctcggtgcacgtgctttacacgtgttgagtcgaggtgaaaaaacgtctaggccccccgaaccacggggacgtggttttcctttgaaaaccacgattacaat

SEQ ID NO: 3 - DNA, 696 bp, Unknown
  source: /note="Description of Unknown: Encephalomyocarditis virus sequence"
ttgccagtctgctcgatatcgcaggctgggtccgtgactacccactccccctttcaacgtgaaggctacgatagtgccagggcgggtactgccgtaagtgccaccccaaacaacaacaacaaaacaaactccccctccccccccttactatactggccgaagccacttggaataaggccggtgtgcgtttgtctacatgctattttctaccgcattaccgtcttatggtaatgtgagggtccagaacctgaccctgtcttcttgacgaacactcctaggggtctttcccctctcgacaaaggagtgtaaggtctgttgaatgtcgtgaaggaagcagttcctctggaagcttcttaaagacaaacaacgtctgtagcgaccctttgcaggcagcggaaccccccacctggtgacaggtgcctctgcggccaaaagccacgtgtataagatacacctgcaaaggcggcacaaccccagtgccacgttgtgagttggatagttgtggaaagagtcaaatggctctcctcaagcgtattcaacaaggggctgaaggatgcccagaaggtaccccattgtatgggatctgatctggggcctcggtgcacgtgctttacacgtgttgagtcgaggtgaaaaaacgtctaggccccccgaaccacggggacgtggttttcctttgaaaaccacgattacaat

SEQ ID NO: 4 - DNA, 697 bp, Unknown
  source: /note="Description of Unknown: Encephalomyocarditis virus sequence"
ttgccagtctgctcgatatcgcaggctgggtccgtgactacccactccccctttcaacgtgaaggctacgatagtgccagggcgggtactgccgtaagtgccaccccaaaacaacaacaaccccccctctccctcctccccccctaacgttactggccgaagccgcttggaataaggccggtgtgcgtttgtctatatgttattttccaccatattgccgtcttttggcaatgtgagggcccggaaacctggccctgtcttcttgacgagcattcctaggggtctttcccctctcgccaaaggaatgcaaggtctgttgaatgtcgtgaaggaagcagttcctctggaagcttcttgaagacaaacaacgtctgtagcgaccctttgcaggcagcggaaccccccacctggcgacaggtgcctctgcggccaaaagccacgtgtataagatacacctgcaaaggcggcacaaccccagtgccacgttgtgagttggatagttgtggaaagagtcaaatggctctcctcaagcgtattcaacaaggggctgaaggatgcccagaaggtaccccattgtatgggatctgatctggggcctcggtgcacatgctttacatgtgtttagtcgaggttaaaaaacgtctaggccccccgaaccacggggacgtggttttcctttgaaaaacacgatgataat

SEQ ID NO: 5 - DNA, 562 bp, Unknown
  source: /note="Description of Unknown: Encephalomyocarditis virus sequence"
ccccccccctaacgttactggccgaagccgcttggaataaggccggtgtgcgtttgtctatatgttattttccaccatattgccgtcttttggcaatgtgagggcccggaaacctggccctgtcttcttgacgagcattcctaggggtctttcccctctcgccaaaggaatgcaaggtctgttgaatgtcgtgaaggaagcagttcctctggaagcttcttgaagacaaacaacgtctgtagcgaccctttgcaggcagcggaaccccccacctggcgacaggtgcctctgcggccaaaagccacgtgtataagatacacctgcaaaggcggcacaaccccagtgccacgttgtgagttggatagttgtggaaagagtcaaatggctctcctcaagcgtattcaacaaggggctgaaggatgcccagaaggtaccccattgtatgggatctgatctggggcctcggtgcacatgctttacatgtgtttagtcgaggttaaaaaacgtctaggccccccgaaccacggggacgtggttttcctttgaaaaacacgatgataat

SEQ ID NO: 6 - DNA, 156 bp, Unknown
  source: /note="Description of Unknown: Picobirnavirus sp. sequence"
gtaaattaaatgctatttacaaaatttaaacagaaaggagagatgttatgaaccggttttacaaggtttcatacatcgaaaatagcactacctggggcagccgacacactaacatcgtctgtttaaccagaagtgttactgaaaggaggttattta

SEQ ID NO: 7 - DNA, 340 bp, Unknown
  source: /note="Description of Unknown: Hepatitis C virus sequence"
acctgcccctaataggggcgacactccgccatgaatcactcccctgtgaggaactactgtcttcacgcagaaagcgtctagccatggcgttagtatgagtgtcgtacagcctccaggcccccccctcccgggagagccatagtggtctgcggaaccggtgagtacaccggaattgccgggaagactgggtcctttcttggataaacccactctatgcccggacatttgggcgtgcccccgcaagactgctagccgagtagcgttgggttgcgaaaggccttgtggtactgcctgatagggtgcttgcgagtgccccgggaggtctcgtagaccgtgcatc

SEQ ID NO: 8 - DNA, 315 bp, Unknown
  source: /note="Description of Unknown: Human Cosavirus sequence"
ctacaagctttgtgtaaacaaacttttgtttggcttttctcaagcttctctcacatcaggccccaaagatgtcctgaaggtaccccgtgtatctgaggatgagcaccatcgactacccggacctgcaaaattttgcaaacgcatgtggtatcccagccccctcctctcggggagggggctttgctcactcagcacaggatctgatcaggagatccacctccggtgctttacaccggggcgtggatttaaaaattgcccaaggcctggcgcacaacctaggggactaggttttccttatattttaaagctgtcaat

SEQ ID NO: 9 - DNA, 182 bp, Unknown
  source: /note="Description of Unknown: Human Cosavirus sequence"
gtcttaggacgacgcatgtggtatcccagcccccgcctacattggcgggggcttttgaagcaccagacactggatctgatcaggaggagggtagctgctttacagcccctcttaaaaattgcccaaggtccggccacccaacctaggggactaggttttccttttatttttaaattgtcatt

SEQ ID NO: 10 - DNA, 759 bp, Unknown
  source: /note="Description of Unknown: Human Cosavirus sequence"
acatgggggagactgcatgtggcagtcttgaaacgtgtggtttgacgtctaccttatatggcagtgggtggagtactgcaaagatgtcaccgtgctttacacggtttttgaaccccacaccggctgtttgacgctcgtagggcagcaggtttattttcattaaaattcttactttctagctgcatgagttctattcatgcagacggagtgatactcccgttccttcttggacaggttgcctccacgccctttgtggatcttaaggtgaccaagtcactggtgttggaggtgaagatagagagtcctcttgggaatgtcatgtggctgtgccaggggttgtagcgatgccattcgtgtgtgcggatttcctctcgtggtgacacgagcctcacaggccaaaagccccgtccgaaaggacccgaatggtggagtgaccctgactcccccctgcatagttttgtgattaggaacttgaggaatttctgtcataaatctctatcacatcaggccccaaagatgtcctgaaggtaccctgtgtatctgaggatgagcaccaccgactacccggacttgcattagcagacacatgtggttgcccagccccacctcttcagaggtggggctttgctcactcagcacaggatctgatcaggagccccgctcgtgtgctttacactcgacgcggggttaaaaattgcccaaggcctggcacaacaacctaggggactaggttttcctatttttgtaaattatgtcaat

SEQ ID NO: 11 - DNA, 478 bp, Unknown
  source: /note="Description of Unknown: Human rhinovirus sequence"
gtgacaatcagccagattgttaacggtcaagcacttctgtttccccggtacccttgtatacgcttcacccgaggcgaaaagtgaggttatcgttatccgcaaagtgcctacgagaagcctagtagcacttttgaagcctatggctggtcgctcaactgtttacccagcagtagacctggcagatgaggctagatgttccccaccagcgatggtgatctagcctgcgtggctgcctgcacactctattgagtgtgaagccagaaagtggacaaggtgtgaagagcctattgtgctcactttgagtcctccggcccctgaatgtggctaatcctaaccccgtagctgttgcatgtaatccaacatgtctgcagtcgtaatgggcaactatgggatggaaccaactactttgggtgtccgtgtttcttgtttttctttatgcttgcttatggtgacaactgtagttattacatttgttacc

SEQ ID NO: 12 - DNA, 628 bp, Unknown
  source: /note="Description of Unknown: Human rhinovirus sequence"
ttaaaacagcggatgggtatcccaccattcgacccattgggtgtagtactctggtactatgtacctttgtacgcctgtttctccccaaccacccttccttaaaattcccacccatgaaacgttagaagcttgacattaaagtacaataggtggcgccatatccaatggtgtctatgtacaagcacttctgtttcccaggagcgaggtataggctgtacccactgccaaaagcctttaaccgttatccgccaaccaactacgtaacagttagtaccatcttgttcttgactggacgttcgatcaggtggattttccctccactagtttggtcgatgaggctaggaattccccacgggtgaccgtgtcctagcctgcgtggcggccaacccagcttatgctgggacgcccttttaaggacatggtgtgaagactcgcatgtgcttggttgtgagtcctccggcccctgaatgcggctaaccttaaccctagagccttatgccacgatccagtggttgtaaggtcgtaatgagcaattccgggacgggaccgactactttgggtgtccgtgtttctcatttttcttcatattgtcttatggtcacagcatatatatacatatactgtgatc

SEQ ID NO: 13 - DNA, 618 bp, Unknown
  source: /note="Description of Unknown: Human rhinovirus sequence"
ttaaaactgggagtgggttgttcccactcactccacccatgcggtgttgtactctgttattacggtaactttgtacgccagtttttcccacccttccccataatgtaacttagaagtttgtacaatatgaccaataggtgacaatcatccagactgtcaaaggtcaagcacttctgtttccccggtcaatgaggatatgctttacccaaggcaaaaaccttagagatcgttatccccacactgcctacacagagcccagtaccatttttgatataattgggttggtcgctccctgcaaacccagcagtagacctggcagatgaggctggacattccccactggcgacagtggtccagcctgcgtggctgcctgctcacccttcttgggtgagaagcctaattattgacaaggtgtgaagagccgcgtgtgctcagtgtgcttcctccggcccctgaatgtggctaaccttaaccctgcagccgttgcccataatccaatgggtttgcggtcgtaatgcgtaagtgcgggatgggaccaactactttgggtgtccgtgtttcctgtttttcttttgattgcattttatggtgacaatttatagtgtatagattgtcatc

SEQ ID NO: 14 - DNA, 610 bp, Unknown
  source: /note="Description of Unknown: Human rhinovirus sequence"
ttaaaactgggtacaggttgttcccacctgtatcacccacgtggtgtggtgctcttgtattccggtacacttgcacgccagtttgccacccctcacccgtcgtaacttagaagctaacaactcgaccaacaggcggtggtaaaccataccacttacggtcaagcactcctgtttccccggtatgcgaggaatagactcctacagggttgaagcctcaagtatcgttatccgcattggtactacgcaaagcttagtagtgccttgaaagtcccttggttggtcgctccgctagtttcccctagtagacctggcagatgaggcaggacactccccactggcgacagtggtcctgcctgcgtggctgcctgcgcacccttaggggtgcgaagccaagtgacagacaaggtgtgaagagccccgtgtgctaccaatgagtcctccggcccctgaatgcggctaatccaaccccacagctattgcacacaagccagtgtgtatgtagtcgtaatgagcaattgtgggacggaaccgactactttgggtgtccgtgtttccttttattcttatcattctgcttatggtgacaatactgtgaaatagtgttgttacc

SEQ ID NO: 15 - DNA, 614 bp, Unknown
  source: /note="Description of Unknown: Human rhinovirus sequence"
taaaactggatccaggttgttcccacctggatctcctattgggagttgtactctattattccggtaattttgtacgccagttttatcttccccctccccaattgtaacttagaaggttatcaatacgaccaataggtggtagttagccaaactaccaaaggtcaagcacttctgtttccccggtcaaagttgatatgctccaacagggcaaaaacaactgagatcgttatccgcaaagtgcctacgcaaagcctagtaacacctttgaagatttatggttggtcgttccgctatttcccatagtagacctggcagatgaggctagaaatcccccactggcgacagtgctctagcctgcgtggctgcctgcgcaccccttgggtgcgaagccatacattggacaaggtgtgaagagccccgtgtgctcactttgagtcctccggcccctgaatgtggctaaccttaaccctgcagctagtgcatgtaatccaacatgttgctagtcgtaatgagtaattgcgggacgggaccaactactttgggtgtccgtgtttcactttttccttttaatattgcttatggtgacaatatatatagctatatatattgacacc

SEQ ID NO: 16 - DNA, 624 bp, Unknown
  source: /note="Description of Unknown: Salivirus A sequence"
ttcccctgcaaccattacgcttactcgcatgtgcattgagtggtgcatgtgttgaacaaacagctacactcacatgggggcgggttttcccgccctacggcttctcgcgaggcccacccctcccctttctcccataactacagtgctttggtaggtaagcatcctgatcccccgcggaagctgctcacgtggcaactgtggggacccagacaggttatcaaaggcacccggtctttccgccttcaggagtatccctgctagcgaattctagtagggctctgcttggtgccaacctcccccaaatgcgcgctgcgggagtgctcttccccaactcaccctagtatcctctcatgtgtgtgcttggtcagcatatctgagacgatgttccgctgtcccagaccagtccagtaatggacgggccagtgtgcgtagtcgtcttccggcttgtccggcgcatgtttggtgaaccggtggggtaaggttggtgtgcccaacgcccgtactcaggggatacctcaaggcacccaggaatgccagggaggtaccccgcttcacagcgggatctgaccctggggtaaatgtctgcggggggtcttcttggcccacttctcagtacttttcagg

SEQ ID NO: 17 - DNA, 730 bp, Unknown
  source: /note="Description of Unknown: Salivirus FHB sequence"
acatggggggtctgcggacggcttcggcccacccgcgacaagaatgccgtcatctgtcctcattacccgtattccttcccttcccccgcaaccaccacgcttactcgcgcacgtgttgagtggcacgtgcgttgtccaaacagctacacccacacccttcggggcgggtttgtcccgccctcgggttcctcgcggaacccccccctccctctctctctttctatccgccctcacttcccataactacagtgctttggtaggtgagcaccctgaccccccgcggaagctgctaacgtggcaactgtggggatccaggcaggttatcaaaggcacccggtctttccgccttcaggagtatctctgccggtgaattccggtagggctctgcttggtgccaacctcccccaaatgcgcgctgcgggagtgctcttccccaactcatcttagtaacctctcatgtgtgtgcttggtcagcatatctgaggcgacgttccgctgtcccagaccagtccagcaatggacgggccagtgtgcgtagtcgctttccggttttccggcgcatgtttggcgaaacgctgaggtaaggttggtgtgcccaacgcccgtaatttggtgatacctcaagaccacccaggaatgccagggaggtaccccacttcggtgggatctgaccctgggctaattgtctacggtggttcttcttgcttccacttctcttttttctggcatg

SEQ ID NO: 18 - DNA, 709 bp, Unknown
  source: /note="Description of Unknown: Salivirus NG-J1 sequence"
tatggcaggcgggcttgtggacggcttcggcccacccacagcaagaatgccatcatctgtcctcacccccaattttcccttttcttcccctgcaaccattacgcttactcgcatgtgcattgagtggtgcatgtgttgaacaaacagctacactcacatgggggcgggttttcccgccctacggcctctcgcgaggcccaccccttccctccccttataactacagtgctttggtaggtaagcatcctgatcccccgcggaagctgctcacgtggcaactgtggggacccagacaggttatcaaaggcacccggtctttccgccttcaggagtatccctactagtgaattctagcggggctctgcttggtgccaacctcccccaaatgcgcgctgcgggagtgctcttccccaactcaccctagtatcctctcatgtgtgtgcttggtcagcatatctgagacgatgttccgctgtcccagaccagtccagtaatggacgggccagtgcgtgtagtcgtcttccggcttgtccggggcatgtttggtgaaccggtggggtaaggttggtgtgcccaacgcccgtactttggtgacacctcaagaccacccaggaatgccagggaggtaccccacctcacggtgggatctgaccctgggctaattgtctacggtggttcttcttgcttccacttctttcttctgttcacg

SEQ ID NO: 19 - DNA, 708 bp, Unknown
  source: /note="Description of Unknown: Human Parechovirus sequence"
tttgaaaggggtctcctagagagcttggccgtcgggccttataccccgacttgctgagtttctctaggagagcccttttcccagccctgaggcggctggtcaataaaagcctcaaacgtaactaacacctaagaagatcatgtaaaccctatgcctggtctccactattcgaaggcaacttgcaataagaagagtgggatcaagacgcttaaagcatagagacagttttcttttctaacccacatttgtgtggggtggcagatggcgtgccataactctaatagtgagataccacgcttgtggaccttatgctcacacagccatcctctagtaagtttgtgagacgtctggtgacgtgtgggaacttattggaaacaacattttgctgcaaagcatcctactgccagcggaaaaacacctggtaacaggtgcctctggggccaaaagccaaggtttaacagaccctttaggattggttctaaacctgagatgttgtggaagatatttagtacctgctgatctggtagttatgcaaacactagttgtaaggcccatgaaggatgcccagaaggtacccgtaggtaacaagtgacactatggatctgatttggggccagatacctctatcttggtgatctggttaaaaaacatctaatgggccaaacccgggggggatccccggtttcctcttattctatcaatgccact

SEQ ID NO: 20 - DNA, 508 bp, Unknown
  source: /note="Description of Unknown: Crohivirus B sequence"
gtataagagacaggtgtttgccttgtcttcggactggcatcttgggaccaaccccccttttccccagccatgggttaaatggcaataaaggacgtaacaactttgtaaccattaagctttgtaattttgtaaccactaagctttgtgcacataatgtaaccatcaagcttgttagtcccagcaggaggtttgcatgcttgtagccgaaatggggctcgaccccccatagtaggatacttgattttgcattccattgtggacctgcaaactctacacatagaggctttgtcttgcatctaaacacctgagtacagtgtgtacctagaccctatagtacgggaggaccgtttgtttcctcaataaccctacataataggctaggtgggcatgcccaatttgcaagatcccagactgggggtcggtctgggcagggttagatccctgttagctactgcctgatagggtggtgctcaaccatgtgtagtttaaattgagctgttcatatacc

SEQ ID NO: 21 - DNA, 248 bp, Unknown
  source: /note="Description of Unknown: Picornaviridae sp. sequence"
actgaagatcctacagtaactactgccccaatgaacgccacagatgggtctgctgatgactacctatcttagtgctagttgaggtttgaagtgagccggtttttagaagaaccagtttctgaacattatcatccccagcatctattctatacgcacaagatagatagtcatcagcagacacatctgtgctactgcttgatagagttgcggctggtcaacttagattggtataaccagttgagtggcaa

SEQ ID NO: 22 - DNA, 516 bp, Unknown
  source: /note="Description of Unknown: Rosavirus M-7 sequence"
tatgcatcactggacggcctaacctcggtcgtggcttcttgccgatttcagcgctaccaggctttctggtctcgccaggcgttgattagtaggtgcactgtctaagtgaagacagcagtgctctctgtgaaaagttgatgacactcttcaggtttgtagcgatcactcaaggctagcggatttccccgtgtggtaacacacgcctctaggcccagaaggcacggtgttgacagcaccccttgagtggctggtcttccccaccagcacctgatttgtggattcttcctagtaacggacaagcatggctgctcttaagcattcagtgcgtccggggctgaaggatgcccagaaggtacccgcaggtaacgataagctcactgtggatctgatctggggctgcgggctgggtgtctttccacccagccaaaacccgtaaaacggtagtcgcagttaaaaaacgtctaggccccacccccccagggatggggggttcccttaaaccctcacaagttcaac

SEQ ID NO: 23 - DNA, 478 bp, Unknown
  source: /note="Description of Unknown: Shanbavirus A sequence"
tgaaaagggggcgcagggtggtggtggttactaaatacccaccatcgccctgcacttcccttttcccctgtggctcagggtcacttagccccctctttgggttaccagtagttttctacccctgggcacagggttaactatgcaagacggaacaacaatctcttagtccccctcgccgatagtgggctcgacccccatgtgtaggagtggataagggacggagtgagccgatacggggaagagtgtgcggtcacaccttaattccatgagcgctgcgaagaaggaagctgtgaacaatggcgacctgaaccgtacacatggagctccacaggcatggtactcgttagactacgcagcctggttgggagtgggtataccctgggtgagccgccagtgaatgggagttcactggttaacacacactgcctgatagggtcagggcctcctgtccccgccgtaatgaggtagaccatatgcc

SEQ ID NO: 24 - DNA, 403 bp, Unknown
  source: /note="Description of Unknown: Pasivirus A sequence"
gcggctggatattctggccgtgcaactgcttttgaccagtggctctgggtaacttagccaaagtgtccttctccctttccctattatatgttttatggctttgtctggtcttgtttagtttatatataagatcctttccgccgatatagacctcgacagtctagtgtaggaggattggtgatattaatttgccccagaagagtgaccgtgacacatagaaaccatgagtacatgtgtatccgtggaggatcgcccgggactggattccatatcccattgccatcccaacaagcggagggtatacccactatgtgcacgtctgcagtgggagtctgcagatttagtcatactgcctgatagggtgtgggcctgcactctggggtactcaggctgtttatataat

SEQ ID NO: 25 - DNA, 404 bp, Unknown
  source: /note="Description of Unknown: Pasivirus A sequence"
gctggactttctggctgcgcaactgcttttaaccagtggctctgggttacttagccaaaaccccctttccccgtaccctagtttgtgtgtgtattattattttgttgttgttttgtaaatttttatataagatcctttccgccgatatagacctcgacagtctagtgtaggaggattggtgatattaatatgccccagaagagtgaccgtgacacatagaaaccatgagtacatgtgtatccgtggaggatcgcccgggactggattccatatcccattgccatcccaacaaacggagggtatacccgctatgtgcgcgtctacagtgggaatctgtagatttagtcatactgcctgatagggtgtgggcctgcactctggggtactcaggctgtttatataat

SEQ ID NO: 26 - DNA, 744 bp, Unknown
  source: /note="Description of Unknown: Echovirus E14 sequence"
ttaaaacagcctgtgggttgttcccatccacagggcccactgggcgccagcactctggtattgcggtaccttagtgcgcctgttttatatacccgtcccccaaacgtaacttagacgcatgtcaacgaagaccaatagtaagcgcagcacaccagctgtgttccggtcaagcacttctgttaccccggaccgagtatcaataagctactcacgtggctgaaggagaaaacgttcgttacccgaccaattacttcaagaaacctagtaacaccatgaaggttgcgcagtgtttcgctccgcacaaccccagtgtagatcaggtcgatgagtcaccgcattccccacgggtgaccgtggcggtggctgcgctggcggcctgcccatggggaaacccatgggacgcttcaatactgacatggtgcgaagagtctattgagctaattggtagtcctccggcccctgaatgcggctaatcctaactgcggagcagatacccacacaccagtgggcagtctgtcgtaacgggcaactctgcagcggaaccgactactttgggtgtccgtgtttctctttatccttatactggctgcttatggtgacaattgagagattgttaccatatagctattggattggccatccggtgacaaatagagcaattgtgtatttgtttgttggtttcgtgccattaaattacaaggttctaaacacccttaatcttattatagcattcaacacaacaaa

SEQ ID NO: 27 - DNA, 663 bp, Unknown
  source: /note="Description of Unknown: Human Parechovirus sequence"
gtacattagatgcgtcatctgcaactttagtcaataaattacctccaatgtcattaccaacattccctaccttttcactaacacctaagacaacaagtacctatgcctggtctccactattcgaaggcaacttgcaataagaagagtggaattaagacgcttaaagcatagagctagttatcttttctaacccacaaagttttgtggggtggcagatggcgtgccataactctattagtgagataccatgcttgtggatcttatgctcacacagccatcctctagtaagttgataaggtgtctggtgatatgtgggaactcacatgaaccattaatttaccgtaaggtatcctatagccagcggaatcacatctggtgacagatgcctctggggccgaaagccaaggtttaacagaccctataggattggtttcaaaacctgaattgatgtggattgtgtatagtacctgttgatctggtaacagtgtcaacactagttgtaaggcccacgaaggatgcccagaaggtacccgtaggtaacaagtgacactatggatctgatctggggccagctacctctatcatggtgagttggttaaaaaacgtctagtgggccaaacccaggggggatccctggtttccttttacctaatcaaagccact

SEQ ID NO: 28 - DNA, 744 bp, Unknown
  source: /note="Description of Unknown: Aichi virus sequence"
tttgaaaagggggtgggggggcctcggccccctcaccctcttttccggtggtctggtcccggaccaccgttactccattcagcttcttcggaacctgttcggaggaattaaacgggcacccatactccccccaccccccttttgtaactaagtatgtgtgctcgtgatcttgactcccacggaacggaccgatccgttggtgaacaaacagctaggtccacatcctcccttcccctgggagggcccccgccctcccacatcctccccccagcctgacgtatcacaggctgtgtgaagcccccgcgaaagctgctcacgtggcaattgtgggtccccccttcatcaagacaccaggtctttcctccttaaggctagccccggcgtgtgaattcacgttgggcaactagtggtgtcactgtgcgctcccaatctcggccgcggagtgctgttccccaagccaaacccctggcccttcactatgtgcctggcaagcatatctgagaaggtgttccgctgtggctgccaacctggtgacaggtgccccagtgtgcgtaaccttcttccgtctccggacggtagtgattggttaagatttggtgtaaggttcatgtgccaacgccctgtgcgggatgaaacctctactgccctaggaatgccaggcaggtaccccacctccgggtgggatctgagcctgggctaattgtctacgggtagtttcatttccaatccttttatgtcggagtc

SEQ ID NO: 29 - DNA, 734 bp, Unknown
  source: /note="Description of Unknown: Hepatitis A virus sequence"
ttcaagaggggtctccggagttttccggaacccctcttggaagtccatggtgaggggacttgatacctcaccgccgtttgcctaggctataggctaaatttccctttccctgtccttcccctatttccttttgttttgtttgtaaatattaattcctgcaggttcagggttctttaatctgtttctctataagaacactcaatttttcacgctttctgtctcctttcttccagggctctccccttgccctaggctctggccgttgcgcccggcggggtcaactccatgattagcatggagctgtaggagtctaaattggggacgcagatgtttgggacgtcgccttgcagtgttaacttggctttcatgaacctctttgatcttccacaaggggtaggctacgggtgaaacctcttaggctaatacttcaatgaagagatgccttggatagggtaacagcggcggatattggtgagttgttaagacaaaaaccattcaacgccggaggactggctctcatccagtggatgcattgagggaattgattgtcagggctgtctctaggtttaatctcagacctctctgtgcttagggcaaacactatttggccttaaatgggatcctgtgagagggggtccctccattgacagctggactgttctttggggccttatgtggtgtttgcctctgaggtactcaggggcatttaggtttttcctcattcttaaataata

SEQ ID NO: 30 - DNA, 638 bp, Unknown
  source: /note="Description of Unknown: Phopivirus sequence"
gggagtaaacctcaccaccgtttgccgtggtttacggctacctatttttggatgtaaatattaattcctgcaggttcaggtctcttgaattatgtccacgctagtggcactctcttacccataagtgacgccttagcggaacctttctacacttgatgtggttaggggttacattatttccctgggccttctttggccctttttcccctgcactatcattctttcttccgggctctcagcatgccaatgttccgaccggtgcgcccgccggggttaactccatggttagcatggagctgtaggccctaaaagtgctgacactggaactggactattgaagcatacactgttaactgaaacatgtaactccaatcgatcttctacaaggggtaggctacgggtgaaaccccttaggttaatactcatattgagagatacttctgataggttaaggttgctggataatggtgagtttaacgacaaaaaccattcaacagctgtgggccaacctcatcaggtagatgcttttggagccaagtgcgtaggggtgtgtgtggaaatgcttcagtggaaggtgccctcccgaaaggtcgtaggggtaatcaggggcagttaggtttccacaattacaatttgaa

SEQ ID NO: 31 - DNA, 743 bp, Unknown
  source: /note="Description of Unknown: CVA10 sequence"
gctcttccgatctgggttgttcccacccacagggcccactgggcgccagcactctgattccacggaatctttgtgcgcctgttttacaacccttcccaatttgtaacgtagaagcaatacacactactgatcaatagtaggcatggcgcgccagtcatgtcatgatcaagcacttctgttcccccggactgagtatcaatagactgctcacgcggttgaaggagaaaacgttcgttacccggctaactacttcgagaaacctagtagcaccatggaagctgcggagtgtttcgctcagcactttccccgtgtagatcaggtcgatgagtcactgcaatccccacgggcgaccgtggcagtggctgcgttggcggcctgcctatggggcaacccataggacgctctaatgtggacatggtgcgaagagtctattgagctagttagtagtcctccggcccctgaatgcggctaatcctaactgcggagcacatgccttcaacccaggaggtggtgtgtcgtaacgggtaactctgcagcggaaccgactactttgggtgtccgtgtttccttttatccttatattggctgcttatggtgacaatcacggaattgttgccatatagctattggattggccatccggtgtctaacagagctattgtatacctatttgttggatttactcccctatcatacaaatctctgaacactttgtgctttatactgaacttaaacacacgaaa

SEQ ID NO: 32 - DNA, 746 bp, Unknown
  source: /note="Description of Unknown: Enterovirus C sequence"
ttaaaacagctctggggttgttcccaccccagaggcccacgtggcggccagtacaccggtaccacggtacccttgtacgcctgttttatactcccctccccgtaaactagaagcacgaaacacaagttcaatagaagggggtacagaccagtaccaccacgaacaagcacttctgttcccccggtgaggtcacatagactgtccccacggtcaaaagtgactgatccgttatccgctcacgtacttcggaaagcctagtaccaccttggaatctacgatgcgttgcgctcagcactcgaccccggagtgtagcttaggctgatgagtctggacgttccccactggtgacagtggtccaggctgcgttggcggcctacctgtggtccaaaaccacaggacgctagtagtgaacaaggtgtgaagagcccactgagctacctgagaatcctccggcccctgaatgcggctaatcccaaccacggagcaggtaatcgcaaaccagcggtcagcctgtcgtaacgcgtaagtctgtggcggaaccgactactttgggtgtccgtgtttccttttatttttatggtggctgcttatggtgacaatcatagattgttatcataaagcaaattggattggccatccggagtgagctaaactatctatttctctgagtgttggattcgtttcacccacattctgaacaatcagcctcattagtgttaccctgttaataagacgatatcatcacg

SEQ ID NO: 33 - DNA, 726 bp, Unknown
  source: /note="Description of Unknown: Enterovirus D sequence"
ttaaaacagctctggggttgttcccaccccagaggcccacgtggcggctagtactccggtaccccggtacccttgtacgcctgttttatactccctttcccaagtaactttagaagaaataaactaatgttcaacaggagggggtacaaaccagtaccaccacgaacacacacttctgtttccccggtgaagttgcatagactgtacccacggttgaaagcgatgaatccgttacccgcttaggtacttcgagaagcctagtatcatcttggaatcttcgatgcgttgcgatcagcactctaccccgagtgtagcttgggtcgatgagtctggacaccccacaccggcgacgtggtccaggctgcgttggcggcctacccatggctagcaccatgggacgctagttgtgaacaaggtgcgaagagcctattgagctacctgagagtcctccggcccctgaatgcggctaatcccaaccacggagcaaatgctcacaatccagtgagtggtttgtcgtaatgcgcaagtctgtggcggaaccgactactttgggtgtccgtgtttccttttatttttattatggctgcttatggtgacaatctgagattgttatcatatagctattggattagccatccggtgatatcttgaaattttgccataactttttcacaaatcctacaacattacactacactttctcttgaataattgagacaactcata

SEQ ID NO: 34 - DNA, 737 bp, Unknown
  source: /note="Description of Unknown: Enterovirus J sequence"
ttaaaatagcctcagggttgttcccaccctgagggcccacgtggtgtagtactctggtattacggtacctttgtacgcctattttatacccccttccccaagtaatttagaagcaagcacaaaccagttcagtagtaagcagtacaatccagtactgtaatgaacaagtacttctgttaccccggaagggtctatcggtaagctgtacccacggctgaagaatgacctaccgttaaccggctacctacttcgagaagcctagtaatgccgttgaagttttattgacgttacgctcagcacactaccccgtgtgtagttttggctgatgagtcacggcactccccacgggcgaccgtggccgtggctgcgttggcggccaaccaaggagtgcaagctccttggacgtcatattacagacatggtgtgaagagcctattgagctaggtggtagtcctccggcccctgaatgcggctaatcctaactccggagcatatcggtgcgaaccagcacttggtgtgttgtaatacgtaagtctggagcggaaccgactactttgggtgtccgtgtttcctgttttaacttttatggctgcttatggtgacaatttaacattgttaccatatagctgttgggttggccatccggattttgttataaaaccatttcctcgtgccttgacctttaacacatttgtgaacttctttaaatcccttttattagtccttaaatactaaga

SEQ ID NO: 35 - DNA, 327 bp, Pegivirus sp.
aactgttgttgtagcaatgcgcatattgctacttcggtacgcctaattggtaggcgcccggccgaccggccccgcaagggcctagtaggacgtgtgacaatgccatgagggatcatgacactggggtgagcggaggcagcaccgaagtcgggtgaactcgactcccagtgcgaccacctggcttggtcgttcatggagggcatgcccacgggaacgctgatcgtgcaaagggatgggtccctgcactggtgccatgcgcggcaccactccgtacagcctgatagggtggcggcgggcccccccagtgtgacgtccgtggagcgcaac

SEQ ID NO: 36 - DNA, 281 bp, Unknown
  source: /note="Description of Unknown: GB virus C sequence"
tgacgtgggggggttgattttccccccccggcactgggtgcaagccccagaaaccgacgcctatctaagtagacgcaatgactcggcgccgactcggcgaccggccaaaaggtggtggatgggtgatgacagggttggtaggtcgtaaatcccggtcatcctggtagccactataggtgggtcttaagagaaggtcaagattcctcttacgcctgcggcgagaccgcgcacggtccacaggtgttggccctaccggtgtgaataagggcccgacatcaggc

SEQ ID NO: 37 - DNA, 459 bp, Unknown
  source: /note="Description of Unknown: GB virus C sequence"
gacgtgggggggttgatcccccccctttggcactgggtgcaagccccagaaaccgacgcctatttaaacagacgttaagaaccggcgccgacccggcgaccggccaaaaggtggtggatgggtgatgccagggttggtaggtcgtaaatcccggtcatcttggtagccactataggtgggtcttaagggttggttaaggtccctctggcgcttgtggcgagaaagcgcacggtccacaggtgttggccctaccggtgtgaataagggcccgacgtcaggctcgtcgttaaaccgagcccactacccacctgggcaaacaacgcccacgtacggtccacgtcgcccttcaatgtctctcttgaccaataggcttagccggcgagttgacaaggaccagtgggggctgggcggtaggggaaggacccctgccgctgcccttcccggtggagtgggaaatgc

SEQ ID NO: 38 - DNA, 350 bp, Unknown
  source: /note="Description of Unknown: GB virus C sequence"
tgacgtgggggggttgatccgccccccccggcactcggtgcaagccccataaaccgacgcctatctaagtagacgcaatgactcggcgccgactcggcgaccggccaaaaggtggtggatgggtggtgacagggttggtaggtcgtaaatcccggtcatcctggtagccactataggtgggtcttaagagaaggtcaagactcctcttgtgcctgcggcgagaccgcgcacggtccacaggtgctggccctaccggtgtgaataagggcccgacgtcaggctcgtcgttaaaccgagcccgtcacccacctgggcaaacgacgcccacgtacggtccacgtcgcccttca

SEQ ID NO: 39 - DNA, 318 bp, Pegivirus A
tgtagcaatgcgcatattgctacttcggtacgcctaattggtaggcgcccggccgaccggccccgcaagggcctagtaggacgtgtgacaatgccatgcgggatcatgacactggggtgagcggaggcagcaccgaagtcgggtgaactcgactcccagtgcgaccacctggcttggtcgttcatggagggcatgcccacgggaacgctgatcgtgcaaagggatgggtccctgcactggtgccatgcgcggcaccactccgtacagcctgatagggtggcggcgggcccccccagtgtgacgtccgtggagcgcaac

SEQ ID NO: 40 - DNA, 399 bp, Unknown
  source: /note="Description of Unknown: Pasivirus A sequence"
attttctggccgtgtagctgcttttgaccagtggctctgggttacttagccaaatcccccttccttcacccttttaaatttgatggtctgtgttgtttgttttgtcttgtctaaataatatataagatccttcccgccgatacagacctcgacagtctggtgtaggagggttggtgttattaatttgccccagaagagtgaccgtgacacatagaaaccatgagtacatgtgtatccgtggaggatcgcccgggactggattccatatcccattgccatcccaacaagcggagggtatacccactatgtgcgcgtttgcagtgggaatctgcaaatttagtcatactgcctgatagggtgtgggcctgcactctggggtactcaggctgttcatataat

SEQ ID NO: 41 - DNA, 430 bp, Sapelovirus sp.
cccctccacccttaaggtggttgtatcccacataccccaccctcccttccaaagtggacggacaactggattttgactaacggcaagtctgaatggtatgatttggatacgtttaaacggcagtagcgtggcgagctatggaaaaatcgcaattgtcgatagccatgttagtgacgcgcttcggcgtgctcctttggtgattcggcgactggttacaggagagtaggcagtgagctatgggcaaacctctacagtattacttagagggaatgtgcaattgagacttgacgagcgtctctttgagatgtggcgcatgctcttggcattaccatagtgagcttccaggttgggaaacctggactgggcctatactacctgatagggtcgcggctggccgcctgtaactagtatagtcagttgaaaccccccc

SEQ ID NO: 42 - DNA, 504 bp, Rosavirus B
gtctctttagtgtctatgcttcagagagcggtgaactgacaccgttgcttcttgcacagcccttcgtgccggtctttccggttctcgacagcgttgggcatcatggctagttaggctaagatagtggatgatctagtgaacagttttggattgtttggagttttgtagcgatgctagtagtgtgtgtggacctccccacgtggtaacacgtgccccacaggccaaaagccaaggtgttgaaagcacccctactagtcccagactcacccatctgggaactcctctcatgaaaaatcttagtaacttttgattcggctattcatcaacctctctagtcaagggctgaaggatgcccggaaggtacccgcaggtaacgataagctcactgtggatctgatccggggctttggtgcgaccgtctgtccggcgtagccagagttaaaaaacgtctaggcccttccaccccaagggattggggtttccccaatcatttgaaagttcact

SEQ ID NO: 43 - DNA, 532 bp, Unknown
  source: /note="Description of Unknown: Bakunsa virus sequence"
ttttgaacgccacctcggagcgatatccggggaccccctcccctttttccttcctaccttcttcccaaatttccctcttcccttgttattttggtttggatttcctggacatgactcggacggatctatctcatttgctttgtgtctgctccaccagtggcatggtcgaaagatcatcaacactggacgtgtactgtaatggccaaacgtgcccacaggggaaaccatgccggtcgctgtagcggcgggtggacgtggtggacccctctccctgctcataaactttgggtaggtgaagggttcaagcgacgcttgccgtgagggcgcatccggatggtgggaaccaacaaactaggctgtaatggccgacctcaggtggatgagctagggctgctgcaccaaaagggactcgattcgatatcccggcctggtagcctagtgcagtggactcgtagttgggaatctacgactggcctagtacagggtgatagccccgtttcccacgcccacctgttgtagggacacccccccc

SEQ ID NO: 44 - DNA, 494 bp, Tremovirus A
tttgaaagaggcctccggagtgtccggaggctctctttcgacccaacccatactggggggtgtgtgggaccgtacctggagtgcacggtatatatgcattcccgcatggcaagggcgtgctaccttgccccttgacgcatggtatgcgtcatcatttgccttggttaagccccatagaaacgaggcgtcacgtgccgaaaatccctttgcgtttcacagaaccatcctaaccatgggtgtagtatgggaatcgtgtatggggatgattaggatctctcgtagagggataggtgtgccattcaaatccagggagtactctggctctgacattgggacatttgatgtaaccggacctggttcagtatccgggttgtcctgtattgttacggtgtatccgtcttggcacactgaaagggtatttttgggtaatcctttcctactgcctgatagggtggcgtgcccggccacgagagattaagggtagcaatttaaac

SEQ ID NO: 45 - DNA, 378 bp, Unknown
  source: /note="Description of Unknown: Swine Pasivirus 1 sequence"
gcttttgaccagtggctctgggttacttagccaagtccctttctcttattttcactagtttatgttgtgtgttgtctgttttgttttgtttaaattgtatacaagatccttcccgccgacacagacctcgacagtctggtgtaggagggttggtgatattaatttgccccaaaagagtgaccgtgatacgtggaaaccatgagtacatgtgtatccgtggaggatcgcccgggactggattccatatcccattgccatcccaacaaacggagggtatacccaccacgtgcgcgtttgcagtgggaatctgcaaatttagtcatactgcctgatagggtgtgggcctgcactttggggtactcaggctgttcatataat

SEQ ID NO: 46 - DNA, 319 bp, Unknown
  source: /note="Description of Unknown: Parechovirus-like virus PLV-CHN sequence"
acatggggtatgttgtctgtcctgttttgttgaaacaatatataagatcctttccgccgatatagacctcgacagtctagtgtaggaggattggtgatagtaacttgccccagaagagtgaccgtgacacatagaaaccatgagtacatgtgtatccgtggaggatcgcccgggactggattccatatcccattgccatcccaacaaacggagggtatacccactatgtgcgcgtttgcagtgggagcctgcaaatttagtcatactgcctgatagggtgtgggcctgcactctggggtactcaggctgtttatataat

SEQ ID NO: 47 - DNA, 420 bp, Unknown
  source: /note="Description of Unknown: Pasivirus A sequence"
tgaaaaagtggttgtgcagctggattttccggctgtgcaactgcttttgaccagtggctctgggttacttagccaaattcctttcccttatccctattggtttgtgttgtgtgttgtttgttttgttttgtcttaactatatacaagatccttcccgccgatacagacctcgacagtctggtgtaggagggttggtgttattaatttgccccaaaagagtgaccgtgacacgtggaaaccatgagtacatgtgtatccgtggaggatcgcccgggactggattccatatcccattgccatcccaacaaacggagggtatacccaccacgtgcgcgtttgcagtgggaatctgcaaatttagtcatactgcctgatagggtgtgggcctgcactttggggtactcaggctgtttatataat

SEQ ID NO: 48 - DNA, 373 bp, Sicinivirus sp.
gtgtcattaaggtgtgtttggaagttcgaattagctggtttgtggtgattagtagaccccctggaggtacccaattcggatctgaccagggacccgtgactataccgctccggtaattcgggtttaaaacaatgaacgtcaccacacaattacttttctcattttattttcatcattgtcttcctatttaccgattacactcgatttccttggatgttcctggagatttccctggttacctggaccctcattattgttgttgtttcacccagcgagctgtcccaattgcttattatttgcgcttacaacttcgtcctaatatttttctggttgatcgggttgattgagctcccgggctatcctgccattcaac

SEQ ID NO: 49 - DNA, 280 bp, Hepacivirus K
gggaacaatggtccgtccgcggaacgactctagccatgagtctagtacgagtgcgtgccacccattagcacaaaaaccactgactgagccacacccctcccggaatcctgagtacaggacattcgctcggacgacgcatgagcctccatgccgagaaaattgggtatacccacgggtaaggggtggccacccagcgggaatctgggggctggtcactgactatggtacagcctgatagggtgctgccgcagcgtcagtggtatgcggctgttcatggaac

SEQ ID NO: 50 - DNA, 384 bp, Hepacivirus A
acctccgtgctaggcacggtgcgttgtcagcgttttgcgcttgcatgcgctacacgcgtcgtccaacgcggagggaacttcacatcaccatgtgtcactccccctatggagggttccaccccgcttacacggaaatgggttaaccatacccaaagtacgggtatgcgggtcctcctagggcccccccggcaggtcgagggagctggaattcgtgaattcgtgagtacacgaaaatcgcggcttgaacgtctttgaccttcggagccgaaatttgggcgtgccccacgaaggaaggcgggggcggtgttgggccgccgccccctttatcccacggtctgataggatgcttgcgagggcacctgccggtctcgtagaccataggac

SEQ ID NO: 51 - DNA, 384 bp, Unknown
  source: /note="Description of Unknown: Bovine viral diarrhea virus 1 sequence"
gtatacgagaatttgcctaggacctcgtttacaatatgggcaatctaaaattataattaggcctaagggacaaatcctcctcagcgaaggccgaaaagaggctagccatgcccttagtaggactagcaaaataaggggggtagcaacagtggtgagttcgttggatggctgaagccctgagtacagggtagtcgtcagtggttcgacgcttcggaggacaagcctcgagataccacgtggacgagggcatgcccacagcacatcttaacctggacgggggtcgttcaggtgaaaacggtttaaccaaccgctacgaatacagcctgatagggtgctgcagaggcccactgtattgctactgaaaatctctgctgtacatggcac

SEQ ID NO: 52 - DNA, 372 bp, Unknown
  source: /note="Description of Unknown: Border Disease virus sequence"
gtatacgggagtagctcatgcccgtatacaaaattggatattccaaaactcgattgggttagggagccctcctagcgacggccgaaccgtgttaaccatacacgtagtaggactagcagacgggaggactagccatcgtggtgagatccctgagcagtctaaatcctgagtacaggatagtcgtcagtagttcaacgcaggcacggttctgccttgagatgctacgtggacgagggcatgcccaagacttgctttaatctcggcgggggtcgccgaggtgaaaacacctaacggtgttggggttacagcctgatagggtgctgcagaggcccacgaataggctagtataaaaatctctgctgtacatggcac

SEQ ID NO: 53 - DNA, 388 bp, Unknown
  source: /note="Description of Unknown: Bovine viral diarrhea virus 2 sequence"
gtatacgagattagctaaagtactcgtatatggattggacgtcaacaaatttttaattggcaacgtagggaaccttcccctcagcgaaggccgaaaagaggctagccatgccctttagtaggactagcaaaagtagggggactagcggtagcagtgagttcgttggatggccgaacccctgagtacaggggagtcgtcaatggttcgacactccattagtcgaggagtctcgagatgccatgtggacgagggcatgcccacggcacatcttaacccatgcgggggttgcatgggtgaaagcgctaatcgtggcgttatggacacagcctgatagggtgtagcagagacctgctattccgctagtaaaaaactctgctgtacatggcac

SEQ ID NO: 54 - DNA, 373 bp, Unknown
  source: /note="Description of Unknown: Classical swine fever virus sequence"
gtatacgaggttagttcattctcgtatgcattattggacaaatcaaaatttcaatttggttcagggcctccctccagcgacggccgaactgggctagccatgcccatagtaggactagcaaacggagggactagccgtagtggcgagctccctgggtgttctaagtcctgagtacaggacagtcgtcagtagttcgacgtgagcagaagcccacctcgagatgctatgtggacgagggcatgcccaagacgcaccttaaccctagcgggggtcgctagggtgaaatcacaccacgtgatgggagtccgacctgatagggtgctgcagaggctcactattaggctagtataaaaatctctgctgtacatggcac

SEQ ID NO: 55 - DNA, 191 bp, Unknown
  source: /note="Description of Unknown: Human blood-associated dicistrovirus sequence"
aaaaccgaccccagagatcagaaagtcgttgacgcgatcttttattagaggacgttgcgctggcgcgagctttaattagcagacgccaaaaataaacaacaaaatgctgatcgcgagacttaattgtcagacgattggccaaatccgatgtgatctttgctgctcccagattgccgaaataggagtagtag

SEQ ID NO: 56 - DNA, 438 bp, Unknown
  source: /note="Description of Unknown: Hubei Picorna-like virus sequence"
ccccaaaaccccccccttaaactcaacactgtagtggattcattttccgttgcaaaacaaaacattactacccgcatttatgtaggctctgtgttttctatgcgaccgttacattaatctctactctgacccactagtttataaaaccgaagacctgaatgaaacgattttccttcttttcaacctctaacgaacctctgacggcttgagaaacctgaagttagtaattatgtttaaaagaaaggaaagtcaaacgcgatgactcttacatccctattccataccgttgctccacaatgtgagcgatgcgaggtcgggactgcagtattaggggaacgagctacatggagagttaattatctctcccctcctacgggagtctcatgtgagctgtagaaagcggttggcacctctcgttacctcgcctgtacatgatcc

SEQ ID NO: 57 - DNA, 193 bp, Cricket paralysis virus
aaaagcaaaaatgtgatcttgcttgtaaatacaattttgagaggttaataaattacaagtagtgctatttttgtatttaggttagctatttagctttacgttccaggatgcctagtggcagccccacaatatccaggaagccctctctgcggtttttcagattaggtagtcgaaaaacctaagaaatttacct

SEQ ID NO: 58 - DNA, 752 bp, Unknown
  source: /note="Description of Unknown: Salivirus A sequence"
tttcctcctttcgaccgccttacggcaggcgggtccgcggacggcttcggcctacccgcgacaagaatgccgtcatctgtccttatcacccatattctttcccttcccccgcaaccatcacgcttactcgcgcacgtgttgagtggcacgtgcgttgtccaaacagttacactcacacccttggggcgggtttgtcccgccctcgggttcctcgcggaaccctccctcttctctctccctttctatccgccttcactttccataactacagtgctttggtaggtaagcatcctgaccccccgcggaagctgccaacgtggcaactgtggggatccaggcaggttatcaaaggcacccggtctttccgccttcaggagtatccctgccggtgaattccgacagggctctgcttggtgccaacctcccccaaatgcgcgctgcgggagtgctcttccccaactcatcttagtaacctctcatgtgtgtgcttggtcagcatatctgaggcgacgttccgctgtcccagaccagtccagcaatggacgggccagtgtgcgtagtcgctttccggtttcccggcgcatgtttggcgaaacgctgaggtaaggttggtgtgcccaatgcccgtaatttggtgacacctcaagaccacccaggaatgccagggaggtaccccacttcggtgggatctgaccctgggctaattgtctacggtggttcttcttgcttccacttctcttttttctggcatg

SEQ ID NO: 59 - DNA, 708 bp, Unknown
  source: /note="Description of Unknown: Salivirus A sequence"
tatggcaggcgggcttgtggacggcttcggcccacccacagcaagaatgccatcatctgtcctcacccccatgtttcccctttctttccctgcaaccgttacgcttactcgcaggtgcatttgagtggtgcacgtgttgaataaacagctacactcacatgggggcgggttttcccgccctgcggcctctcgcgaggcccacccctccccttcctcccataactacagtgctttggtaggtaagcatcctgatcccccgcggaagctgctcacgtggcaactgtggggacccagacaggttatcaaaggcacccggtctttccgccttcaggagtatccctgctagtgaattctagtagggctctgcttggtgccaacctcccccaaatgcgcgctgcgggagtgctcttccccaactcaccctagtatcctctcatgtgtgtgcttggtcagcatatctgagacgatgttccgctgtcccagaccagtccagtaatggacgggccagtgtgcgtagtcgtcttccggcttttccggcgcatgtttggtgaaccggtggggtaaggttggtgtgcccaacgcccgtactttggtgatacctcaagaccacccaggaatgccagggaggtaccccgcttcacagcgggatctgaccctgggctaattgtctacggtggttcttcttgcttccacttctttctactgttc

SEQ ID NO: 60 - DNA, 718 bp, Unknown
  source: /note="Description of Unknown: Salivirus A sequence"
tttcgaccgccttatggcaggcgggcttgtggacggcttcggcccacccacagcaagaatgccatcatctgtcctcacccccatttctcccctccttcccctgcaaccattacgcttactcgcatgtgcattgagtggtgcacgtgttgaacaaacagctacactcacgtgggggcgggttttcccgcccttcggcctctcgcgaggcccacccttccccttcctcccataactacagtgctttggtaggtaagcatcctgatcccccgcggaagctgctcgcgtggcaactgtggggacccagacaggttatcaaaggcacccggtctttccgcctccaggagtatccctgctagtgaattctagtggggctctgcttggtgccaacctcccccaaatgcgcgctgcgggagtgctcttccccaactcaccctagtatcctctcatgtgtgtgcttggtcagcatatctgagacgatgttccgctgtcccagaccagtccagcaatggacgggccagtgtgcgtagtcgtcttccggcttgtccggcgcatgtttggtgaaccggtggggtaaggttggtgtgcccaacgcccgtactttggtgacaactcaagaccacccaggaatgccagggaggtaccccgcctcacggcgggatctgaccctgggctaattgtctacggtggttcttcttgcttccatttctttcttctgttc

SEQ ID NO: 61 - DNA, 699 bp, Unknown
  source: /note="Description of Unknown: Salivirus A sequence"
tatggcaggcgggcttgtggacggtttcggcccacccacagcaagaatgccatcatctgtcctcacccccaattttccctttcttcccctgcaatcatcacgcttactcgcatgtgcattgagtggtgcatgtgttgaacaaacagctacactcacatgggggcgggttttcccgccctacggcctctcgcgaggcccacccttcccctccccttataactacagtgctttggcaggtaagcatcctgatcccccgcggaagctgctcacgtggcaactgtggggacccagacaggttatcaaaggcacccggtctttccgccttcaggagcatccccactagtgaattctagtggggctctgcttggtgccaacctcccccaaatgcgcgctgcgggagtgctcttccccaacccatcctagtatcctctcatgtgtgtgcttggtcagcatatctgagacgacgttccgctgtcccagaccagtccagtaatggacgggccagtgtgcgtagtcgtcttccggcttgtccggcgcatgtttggtgaaccggtggggtaaggttggtgtgcccaacgcccgtactttggtgacacctcaagaccacccaggaatgccagggaggtaccccgcctcacggcgggatctgaccctgggctaattgtctacggtggttcttcttgcttccacttctttctt

SEQ ID NO: 62 - DNA, 624 bp, Unknown
  source: /note="Description of Unknown: Salivirus A sequence"
ttctcctgcaaccattacgcttaatcgcatgtgcattgagtggtgcatgtgttgaacaaacagctacaatcacatgggggcgggttttcccgccccacggcttctcgcgaggcccatccctcccttttctcccataactacagtgctttggtaggtaagcatcccgatctcccgcggaagctgctcacgtggcaactgtggggacccagacaggttatcaaaggcacccggtctttccgccttcaggagtatccctgctagcgaattctagtagggctctgcttggtgccaacctctcccaaatgcgcgctgcgggagtgctcttccccaaatcaccccagtatcctctcatgtgtgtgcctggtcagcatatctgagacgatgttccgctgtcccagaccagtccagtaatggacgggccagtgtgcgtagtcgtcctccggcttgtccggcgcatgtttggtgaaccggtggggtaaggttggtgtgcccaacgcccgtaatcaggggatacctcaaggcacccaggaatgccagggaggtatcccgcctcacagcgggatctgaccctggggtaaatgtctgcggggggtcctcttggcccaattctcagtaattttcagg

SEQ ID NO: 63 - DNA, 650 bp, Unknown
  source: /note="Description of Unknown: Salivirus A sequence"
tctgtcctcaccccatcttcccttctttcctgcaccgttacgcttactcgcatgtgcattgagtggtgcacgtgcttgaacaaacagctacactcacatgggggcgggttttcccgccctgcggcctctcgcgaggcccacccctccccttcctcccataactacagtgctttggtaggtaagcatcctgatcccccgcggaagctgctcacgtggcaactgtggggacccagacaggttatcaaaggcacccggtctttccgccttcaggagtatccctgctagtgaattctagtagggctctgcttggtgccaacctcccccaaatgcgcgctgcgggagtgctcttccccaactcaccctagtatcctctcatgtgtgtgcttggtcagcatatctgagacgatgttccgctgtcccagaccagtccagtaatggacgggccagtgtgcgtagtcgtcttccggcttgtccggcgcatgtttggtgaaccggtggggtaaggttggtgtgcccaacgcccgtactttggtgatacctcaagaccacccaggaatgccagggaggtaccccgcttcacagcgggatctgaccctgggctaattgtctacggtggttcttcttgcttccacttctttctactgttcatg

SEQ ID NO: 64 - DNA, 730 bp, Unknown; identical to SEQ ID NO: 17
  source: /note="Description of Unknown: Salivirus FHB sequence"

SEQ ID NO: 65 - DNA, 741 bp, Unknown
  source: /note="Description of Unknown: CVB3 sequence"
ttaaaacagcctgtgggttgatcccacccacaggcccattgggcgctagcactctggtatcacggtacctttgtgcgcctgttttataccccctcccccaactgtaacttagaagtaacacacaccgatcaacagtcagcgtggcacaccagccacgttttgatcaagcacttctgttaccccggactgagtatcaatagactgctcacgcggttgaaggagaaagcgttcgttatccggccaactacttcgaaaaacctagtaacaccgtggaagttgcagagtgtttcgctcagcactaccccagtgtagatcaggtcgatgagtcaccgcattccccacgggcgaccgtggcggtggctgcgttggcggcctgcccatggggaaacccatgggacgctctaatacagacatggtgcgaagagtctattgagctagttggtagtcctccggcccctgaatgcggctaatcctaactgcggagcacacaccctcaagccagagggcagtgtgtcgtaacgggcaactctgcagcggaaccgactactttgggtgtccgtgtttcattttattcctatactggctgcttatggtgacaattgagagatcgttaccatatagctattggattggccatccggtgactaatagagctattatatatccctttgttgggtttataccacttagcttgaaagaggttaaaacattacaattcattgttaagttgaatacagcaaa

SEQ ID NO: 66 - DNA, 741 bp, Unknown
  source: /note="Description of Unknown: CVB1 sequence"
ttaaaacagcctgtgggttgttcccacccacaggcccattgggcgctagcactctggtatcacggtacctttgtgcgcctgttttacatcccctccccaaattgtaatttagaagtttcacacaccgatcattagcaagcgtggcacaccagccatgttttgatcaagcacttctgttaccccggactgagtatcaatagaccgctaacgcggttgaaggagaaaacgttcgttacccggccaactacttcgaaaaacctagtaacaccatggaagttgcggagtgtttcgctcagcactaccccagtgtagatcaggtcgatgagtcaccgcgttccccacgggcgaccgtggcggtggctgcgttggcggcctgcctacggggaaacccgtaggacgctctaatacagacatggtgcgaagagtctattgagctagttggtaatcctccggcccctgaatgcggctaatcctaactgcggagcacataccctcaaaccagggggcagtgtgtcgtaacgggcaactctgcagcggaaccgactactttgggtgtccgtgtttcattttattcctatactggctgcttatggtgacaattgacaggttgttaccatatagttattggattggccatccggtgactaacagagcaattatatatctctttgttgggtttataccacttagcttgaaagaggttaaaacactacatctcatcattaaactaaatacaacaaa

SEQ ID NO: 67 - DNA, 742 bp, Unknown
  source: /note="Description of Unknown: Echovirus 7 sequence"
ttaaaacagcctgtgggttgttcccacccacagggcccattgggcgtcagcaccctggtatcacggtacctttgtgcgcctgttttatatcccttcccccaattgtaacttagaagaaacacacaccgatcaacagcaagcgtggcacaccagccatgttttggtcaagcacttctgttaccccggactgagtatcaatagactgctcacgcggttgaaggagaaagcgtccgttatccggccagctacttcgagaaacctagtaacaccatggaagttgcggagtgtttcgctcagcactaccccagtgtagatcaggtcgatgagtcaccgctttccccacgggcgaccgtggcggtggctgcgttggcggcctgcctatgggggaacccataggacgctctaatacagacatggtgcgaagagtctattgagctagctggtattcctccggcccctgaatgcggctaatcctaactgtggagcacatgcccctaatccaaggggtagtgtgtcgtaatgagcaattccgcagcggaaccgactactttgggtgtccgtgtttcctcttattcttgtactggctgcttatggtgacaattgagagattgttaccatatagctattggattggccatccggtgactaatagagctattgtgtatctctttgttggatttgtaccacttaatttgaaagaaatcaggacactacgctacattttactattgaacaccgcaaa

SEQ ID NO: 68 - DNA, 743 bp, Unknown
  source: /note="Description of Unknown: CVB5 sequence"
ttaaaacagcctgtgggttgtacccacccacagggcccactgggcgctagcactctggtatcacggtacctttgtgcgcctgttttatgcccccttcccccaattgaaacttagaagttacacacaccgatcaacagcgggcgtggcataccagccgcgtcttgatcaagcactcctgtttccccggaccgagtatcaatagactgctcacgcggttgaaggagaaaacgttcgttacccggctaactacttcgagaaacctagtagcatcatgaaagttgcgaagcgtttcgctcagcacatccccagtgtagatcaggtcgatgagtcaccgcattccccacgggcgaccgtggcggtggctgcgttggcggcctgcctacggggcaacccgtaggacgcttcaatacagacatggtgcgaagagtcgattgagctagttagtagtcctccggcccctgaatccggctaatcctaactgcggagcacataccctcaacccagggggcattgtgtcgtaacgggtaactctgcagcggaaccgactactttgggtgtccgtgtttccttttattcttataatggctgcttatggtgacaattgaaagattgttaccatatagctattggattggccatccggtgtctaacagagctattatatacctctttgttggatttgtaccacttgatctaaaggaagtcaagacactacaattcatcatacaattgaacacagcaaa

SEQ ID NO: 69 - DNA, 743 bp, Unknown
  source: /note="Description of Unknown: Enterovirus A71 sequence"
ttaaaacagcctgtgggttgcacccactcacagggcccactgggcgcaagcactctggcacttcggtacctttgtgcgcctgttttatatcccctcccccaatgaaatttagaagcagcaaaccccgatcaatagcaggcataacgctccagttatgtcttgatcaagcacttctgtttccccggactgagtatcaatagactgctcacgcggttgaaggagaaaacgttcgttatccggctaactacttcggaaagcctagtaacaccatggaagttgcggagagtttcgttcagcacttccccagtgtagatcaggtcgatgagtcaccgcattccccacgggcgaccgtggcggtggctgcgttggcggcctgcccatggggtaacccatgggacgctctaatacggacatggtgtgaagagtctactgagctagttagtagtcctccggcccctgaatgcggctaatcccaactgcggagcacacgcccacaagccagtgggtagtgtgtcgtaacgggcaactctgcagcggaaccgactactttgggtgtccgtgtttccttttattcttatgttggctgcttatggtgacaattaaagagttgttaccatatagctattggattggccatccggtgtgcaacagagcgatcgtttacctatttattggttttgtaccattgacactgaagtctgtgatcacccttaattttatcttaaccctcaacacagccaaac

SEQ ID NO: 70 - DNA, 742 bp, Unknown
  source: /note="Description of Unknown: CVA3 sequence"
ttaaaacagcctgtgggttgtacccacccacagggcccactgggcgctagcacactggtattacggtacctttgtgcgcctgttttataccccccccaacctcgaaacttagaagtaaagcaaacccgatcaatagcaggtgcggcgcaccagtcgcatcttgatcaagcacttctgtaaccccggaccgagtatcaatagactgctcacgcggttgaaggagaaaacgttcgttacccggctaactacttcgagaaacccagtagcatcatgaaagttgcagagtgtttcgctcagcactacccccgtgtagatcaggccgatgagtcaccgcacttccccacgggcgaccgtggcggtggctgcgttggcggcctgcctatggggcaacccataggacgctctaatacggacatggtgcgaagagtctattgagctagttagtagtcctccggcccctgaatgcggctaatcctaactgcggagcacatacccttaatccaaagggcagtgtgtcgtaacgggtaactctgcagcggaaccgactactttgggtgtccgtgtttccttttaatttttactggctgcttatggtgacaattgaggaattgttgccatatagctattggattggccatccggtgactaacagagctattgtgttccaatttgttggatttaccccgctcacactcacagtcgtaagaacccttcattacgtgttatttctcaactcaagaaa

SEQ ID NO: 71 - DNA, 745 bp, Unknown
  source: /note="Description of Unknown: CVA12 sequence"
ttaaaacagcctgtgggttgtacccacccacagggcccactgggcgctagcactctggtactacggtacctttgtgtgcctgttttaagcccctaccccccactcgtaacttagaaggcttctcacactcgatcaatagtaggtgtggcacgccagtcacaccgtgatcaagcacttctgttaccccggtctgagtaccaataagctgctaacgcggctgaaggggaaaacgatcgttatccggctaactacttcgagaaacccagtaccaccatgaacgttgcagggtgtttcgctcggcacaaccccagtgtagatcaggtcgatgagtcaccgtattccccacgggcgaccgtggcggtggctgcgttggcggcctgcccatggggtgacccatgggacgctctaatactgacatggtgcgaagagtctattgagctagttagtagtcctccggcccctgaatgcggctaatcctaactgcggagcacatacccttaatccaaagggcagtgtgtcgtaacgggcaactctgcagcggaaccgactactttgggtgtccgtgtttccttttattcttacattggctgcttatggtgacaattgaaaagttgttaccatatagctattggattggccatccggtgacaaatagagctattgtatatctttttgttggttacgtaccccttaattacaaagtggtttcaactttgaaatacatcctaacactaaattgtagaaa

SEQ ID NO: 72 - DNA, 742 bp, Unknown
  source: /note="Description of Unknown: Echovirus E24 sequence"
ttaaaacagcctgtgggttgcacccacccacagggcccacagggcgctagcactctggtatcacggtacctttgtgcgcctgttttattaccccttccccaattgaaaattagaagcaatgcacaccgatcaacagcaggcgtggcgcaccagtcacgtctcgatcaagcacttctgtttccccggaccgagtatcaatagactgctcacgcggttgaaggagaaagtgttcgttatccggctaaccacttcgagaaacccagtaacaccatgaaagttgcagggtgtttcgctcagcacttccccagtgtagatcaggtcgatgagtcaccgcgttccccacgggcgaccgtggcggtggctgcgttggcggcctgcctatgggttaacccataggacgctctaatacagacatggtgcgaagagtttattgagctggttagtatccctccggcccctgaatgcggctaatcctaactgcggagcacgtgcctccaatccagggggttgcatgtcgtaacgggtaactctgcagcggaaccgactactttgggtgtccgtgtttccttttattcttatactggctgcttatggtgacaatcgaggaattgttaccatatagctattggattggccatccggtgtctaacagagcgattatatacctctttgttggatttatgcagctcaataccaccaactttaacacattgaaatatatcttaaagttaaacacagcaaa

SEQ ID NO: 73 - DNA, 240 bp, Anabaena sp.
gaagaaattctttaagtggatgctctcaaactcagggaaacctaaatctagttatagacaaggcaatcctgagccaagccgaagtagtaattagtaagttaacaatagatgacttacaactaatcggaaggtgcagagactcgacgggagctaccctaacgtcaagacgagggtaaagagagagtccaattctcaaagccaataggcagtagcgaaagctgcaagagaatgaaaatccgt

SEQ ID NO: 74 - DNA, 239 bp, Anabaena sp.
aagaaattctttaagtggatgctctcaaactcagggaaacctaaatctagttatagacaaggcaatcctgagccaagccgaagtagtaattagtaagttaacaatagatgacttacaactaatcggaaggtgcagagactcgacgggagctaccctaacgtcaagacgagggtaaagagagagtccaattctcaaagccaataggcagtagcgaaagctgcaagagaatgaaaatccgt

SEQ ID NO: 75 - DNA, 238 bp, Anabaena sp.
agaaattctttaagtggatgctctcaaactcagggaaacctaaatctagttatagacaaggcaatcctgagccaagccgaagtagtaattagtaagttaacaatagatgacttacaactaatcggaaggtgcagagactcgacgggagctaccctaacgtcaagacgagggtaaagagagagtccaattctcaaagccaataggcagtagcgaaagctgcaagagaatgaaaatccgt

SEQ ID NO: 76 - DNA, 190 bp, Anabaena sp.
gttatagacaaggcaatcctgagccaagccgaagtagtaattagtaagttaacaatagatgacttacaactaatcggaaggtgcagagactcgacgggagctaccctaacgtcaagacgagggtaaagagagagtccaattctcaaagccaataggcagtagcgaaagctgcaagagaatgaaaatccgt

SEQ ID NO: 77 - DNA, 189 bp, Anabaena sp.
ttatagacaaggcaatcctgagccaagccgaagtagtaattagtaagttaacaatagatgacttacaactaatcggaaggtgcagagactcgacgggagctaccctaacgtcaagacgagggtaaagagagagtccaattctcaaagccaataggcagtagcgaaagctgcaagagaatgaaaatccgt

SEQ ID NO: 78 - DNA, 188 bp, Anabaena sp.
tatagacaaggcaatcctgagccaagccgaagtagtaattagtaagttaacaatagatgacttacaactaatcggaaggtgcagagactcgacgggagctaccctaacgtcaagacgagggtaaagagagagtccaattctcaaagccaataggcagtagcgaaagctgcaagagaatgaaaatccgt

SEQ ID NO: 79 - DNA, 187 bp, Anabaena sp.
atagacaaggcaatcctgagccaagccgaagtagtaattagtaagttaacaatagatgacttacaactaatcggaaggtgcagagactcgacgggagctaccctaacgtcaagacgagggtaaagagagagtccaattctcaaagccaataggcagtagcgaaagctgcaagagaatgaaaatccgt

SEQ ID NO: 80 - DNA, 186 bp, Anabaena sp.
tagacaaggcaatcctgagccaagccgaagtagtaattagtaagttaacaatagatgacttacaactaatcggaaggtgcagagactcgacgggagctaccctaacgtcaagacgagggtaaagagagagtccaattctcaaagccaataggcagtagcgaaagctgcaagagaatgaaaatccgt

SEQ ID NO: 81 - DNA, 139 bp, Anabaena sp.
acaatagatgacttacaactaatcggaaggtgcagagactcgacgggagctaccctaacgtcaagacgagggtaaagagagagtccaattctcaaagccaataggcagtagcgaaagctgcaagagaatgaaaatccgt

SEQ ID NO: 82 - DNA, 138 bp, Anabaena sp.
caatagatgacttacaactaatcggaaggtgcagagactcgacgggagctaccctaacgtcaagacgagggtaaagagagagtccaattctcaaagccaataggcagtagcgaaagctgcaagagaatgaaaatccgt

SEQ ID NO: 83 - DNA, 137 bp, Anabaena sp.
aatagatgacttacaactaatcggaaggtgcagagactcgacgggagctaccctaacgtcaagacgagggtaaagagagagtccaattctcaaagccaataggcagtagcgaaagctgcaagagaatgaaaatccgt

SEQ ID NO: 84 - DNA, 136 bp, Anabaena sp.
atagatgacttacaactaatcggaaggtgcagagactcgacgggagctaccctaacgtcaagacgagggtaaagagagagtccaattctcaaagccaataggcagtagcgaaagctgcaagagaatgaaaatccgt

SEQ ID NO: 85 - DNA, 135 bp, Anabaena sp.
tagatgacttacaactaatcggaaggtgcagagactcgacgggagctaccctaacgtcaagacgagggtaaagagagagtccaattctcaaagccaataggcagtagcgaaagctgcaagagaatgaaaatccgt

SEQ ID NO: 86 - DNA, 134 bp, Anabaena sp.
agatgacttacaactaatcggaaggtgcagagactcgacgggagctaccctaacgtcaagacgagggtaaagagagagtccaattctcaaagccaataggcagtagcgaaagctgcaagagaatgaaaatccgt

SEQ ID NO: 87 - DNA, 133 bp, Anabaena sp.
gatgacttacaactaatcggaaggtgcagagactcgacgggagctaccctaacgtcaagacgagggtaaagagagagtccaattctcaaagccaataggcagtagcgaaagctgcaagagaatgaaaatccgt

SEQ ID NO: 88 - DNA, 132 bp, Anabaena sp.
atgacttacaactaatcggaaggtgcagagactcgacgggagctaccctaacgtcaagacgagggtaaagagagagtccaattctcaaagccaataggcagtagcgaaagctgcaagagaatgaaaatccgt

SEQ ID NO: 89 - DNA, 131 bp, Anabaena sp.
tgacttacaactaatcggaaggtgcagagactcgacgggagctaccctaacgtcaagacgagggtaaagagagagtccaattctcaaagccaataggcagtagcgaaagctgcaagagaatgaaaatccgt

SEQ ID NO: 90 - DNA, 78 bp, Anabaena sp.
caagacgagggtaaagagagagtccaattctcaaagccaataggcagtagcgaaagctgcaagagaatgaaaatccgt

SEQ ID NO: 91 - DNA, 77 bp, Anabaena sp.
aagacgagggtaaagagagagtccaattctcaaagccaataggcagtagcgaaagctgcaagagaatgaaaatccgt

SEQ ID NO: 92 - DNA, 76 bp, Anabaena sp.
agacgagggtaaagagagagtccaattctcaaagccaataggcagtagcgaaagctgcaagagaatgaaaatccgt

SEQ ID NO: 93 - DNA, 75 bp, Anabaena sp.
gacgagggtaaagagagagtccaattctcaaagccaataggcagtagcgaaagctgcaagagaatgaaaatccgt

SEQ ID NO: 94 - DNA, 74 bp, Anabaena sp.
acgagggtaaagagagagtccaattctcaaagccaataggcagtagcgaaagctgcaagagaatgaaaatccgt

SEQ ID NO: 95 - DNA, 40 bp, Anabaena sp.
aataggcagtagcgaaagctgcaagagaatgaaaatccgt

SEQ ID NO: 96 - DNA, 39 bp, Anabaena sp.
ataggcagtagcgaaagctgcaagagaatgaaaatccgt

SEQ ID NO: 97 - DNA, 38 bp, Anabaena sp.
taggcagtagcgaaagctgcaagagaatgaaaatccgt

SEQ ID NO: 98 - DNA, 37 bp, Anabaena sp.
aggcagtagcgaaagctgcaagagaatgaaaatccgt

SEQ ID NO: 99 - DNA, 36 bp, Anabaena sp.
ggcagtagcgaaagctgcaagagaatgaaaatccgt

SEQ ID NO: 100 - DNA, 27 bp, Anabaena sp.
gaaagctgcaagagaatgaaaatccgt

SEQ ID NO: 101 - DNA, 26 bp, Anabaena sp.
aaagctgcaagagaatgaaaatccgt

SEQ ID NO: 102 - DNA, 25 bp, Anabaena sp.
aagctgcaagagaatgaaaatccgt

SEQ ID NO: 103 - DNA, 24 bp, Anabaena sp.
agctgcaagagaatgaaaatccgt

SEQ ID NO: 104 - DNA, 23 bp, Anabaena sp.
gctgcaagagaatgaaaatccgt

SEQ ID NO: 105 - DNA, 22 bp, Anabaena sp.
ctgcaagagaatgaaaatccgt

SEQ ID NO: 106 - DNA, 18 bp, Anabaena sp.
aagagaatgaaaatccgt

SEQ ID NO: 107 - DNA, 17 bp, Anabaena sp.
agagaatgaaaatccgt

SEQ ID NO: 108 - DNA, 16 bp, Anabaena sp.
gagaatgaaaatccgt

SEQ ID NO: 109 - DNA, 35 bp, Anabaena sp.
gcagtagcgaaagctgcaagagaatgaaaatccgt

SEQ ID NO: 110 - DNA, 33 bp, Anabaena sp.
agtagcgaaagctgcaagagaatgaaaatccgt

SEQ ID NO: 111 - DNA, 32 bp, Anabaena sp.
gtagcgaaagctgcaagagaatgaaaatccgt

SEQ ID NO: 112 - DNA, 26 bp, Anabaena sp.
acggacttaaataattgagccttaaa

SEQ ID NO: 113 - DNA, 27 bp, Anabaena sp.
acggacttaaataattgagccttaaag

SEQ ID NO: 114 - DNA, 28 bp, Anabaena sp.
acggacttaaataattgagccttaaaga

SEQ ID NO: 115 - DNA, 76 bp, Anabaena sp.
acggacttaaataattgagccttaaagaagaaattctttaagtggatgctctcaaactcagggaaacctaaatcta

SEQ ID NO: 116 - DNA, 77 bp, Anabaena sp.
acggacttaaataattgagccttaaagaagaaattctttaagtggatgctctcaaactcagggaaacctaaatctag

SEQ ID NO: 117 - DNA, 78 bp, Anabaena sp.
acggacttaaataattgagccttaaagaagaaattctttaagtggatgctctcaaactcagggaaacctaaatctagt

SEQ ID NO: 118 - DNA, 79 bp, Anabaena sp.
acggacttaaataattgagccttaaagaagaaattctttaagtggatgctctcaaactcagggaaacctaaatctagtt

SEQ ID NO: 119 - DNA, 80 bp, Anabaena sp.
acggacttaaataattgagccttaaagaagaaattctttaagtggatgctctcaaactcagggaaacctaaatctagtta

SEQ ID NO: 120 - DNA, 127 bp, Anabaena sp.
acggacttaaataattgagccttaaagaagaaattctttaagtggatgctctcaaactcagggaaacctaaatctagttatagacaaggcaatcctgagccaagccgaagtagtaattagtaagtta

SEQ ID NO: 121 - DNA, 128 bp, Anabaena sp.
acggacttaaataattgagccttaaagaagaaattctttaagtggatgctctcaaactcagggaaacctaaatctagttatagacaaggcaatcctgagccaagccgaagtagtaattagtaagttaa

SEQ ID NO: 122 - DNA, 129 bp, Anabaena sp.
acggacttaaataattgagccttaaagaagaaattctttaagtggatgctctcaaactcagggaaacctaaatctagttatagacaaggcaatcctgagccaagccgaagtagtaattagtaagttaac

SEQ ID NO: 123 - DNA, 130 bp, Anabaena sp.
acggacttaaataattgagccttaaagaagaaattctttaagtggatgctctcaaactcagggaaacctaaatctagttatagacaaggcaatcctgagccaagccgaagtagtaattagtaagttaaca

SEQ ID NO: 124 - DNA, 131 bp, Anabaena sp.
acggacttaaataattgagccttaaagaagaaattctttaagtggatgctctcaaactcagggaaacctaaatctagttatagacaaggcaatcctgagccaagccgaagtagtaattagtaagttaacaa

SEQ ID NO: 125 - DNA, 132 bp, Anabaena sp.
acggacttaaataattgagccttaaagaagaaattctttaagtggatgctctcaaactcagggaaacctaaatctagttatagacaaggcaatcctgagccaagccgaagtagtaattagtaagttaacaat

SEQ ID NO: 126 - DNA, 133 bp, Anabaena sp.
acggacttaaataattgagccttaaagaagaaattctttaagtggatgctctcaaactcagggaaacctaaatctagttatagacaaggcaatcctgagccaagccgaagtagtaattagtaagttaacaata

SEQ ID NO: 127 - DNA, 134 bp, Anabaena sp.
acggacttaaataattgagccttaaagaagaaattctttaagtggatgctctcaaactcagggaaacctaaatctagttatagacaaggcaatcctgagccaagccgaagtagtaattagtaagttaacaatag

SEQ ID NO: 128 - DNA, 135 bp, Anabaena sp.
acggacttaaataattgagccttaaagaagaaattctttaagtggatgctctcaaactcagggaaacctaaatctagttatagacaaggcaatcctgagccaagccgaagtagtaattagtaagttaacaataga

SEQ ID NO: 129 - DNA, 188 bp, Anabaena sp.
acggacttaaataattgagccttaaagaagaaattctttaagtggatgctctcaaactcagggaaacctaaatctagttatagacaaggcaatcctgagccaagccgaagtagtaattagtaagttaacaatagatgacttacaactaatcggaaggtgcagagactcgacgggagctaccctaacgt

SEQ ID NO: 130 - DNA, 189 bp, Anabaena sp.
acggacttaaataattgagccttaaagaagaaattctttaagtggatgctctcaaactcagggaaacctaaatctagttatagacaaggcaatcctgagccaagccgaagtagtaattagtaagttaacaatagatgacttacaactaatcggaaggtgcagagactcgacgggagctaccctaacgtc

SEQ ID NO: 131 - DNA, 190 bp, Anabaena sp.
acggacttaaataattgagccttaaagaagaaattctttaagtggatgctctcaaactcagggaaacctaaatctagttatagacaaggcaatcctgagccaagccgaagtagtaattagtaagttaacaatagatgacttacaactaatcggaaggtgcagagactcgacgggagctaccctaacgtca

SEQ ID NO: 132 - DNA, 191 bp, Anabaena sp.
acggacttaaataattgagccttaaagaagaaattctttaagtggatgctctcaaactcagggaaacctaaatctagttatagacaaggcaatcctgagccaagccgaagtagtaattagtaagttaacaatagatgacttacaactaatcggaaggtgcagagactcgacgggagctaccctaacgtcaa

SEQ ID NO: 133 - DNA, 192 bp, Anabaena sp.
acggacttaaataattgagccttaaagaagaaattctttaagtggatgctctcaaactcagggaaacctaaatctagttatagacaaggcaatcctgagccaagccgaagtagtaattagtaagttaacaatagatgacttacaactaatcggaaggtgcagagactcgacgggagctaccctaacgtcaag

SEQ ID NO: 134 - DNA, 226 bp, Anabaena sp.
acggacttaaataattgagccttaaagaagaaattctttaagtggatgctctcaaactcagggaaacctaaatctagttatagacaaggcaatcctgagccaagccgaagtagtaattagtaagttaacaatagatgacttacaactaatcggaaggtgcagagactcgacgggagctaccctaacgtcaagacgagggtaaagagagagtccaattctcaaagcc

SEQ ID NO: 135 - DNA, 227 bp, Anabaena sp.
acggacttaaataattgagccttaaagaagaaattctttaagtggatgctctcaaactcagggaaacctaaatctagttatagacaaggcaatcctgagccaagccgaagtagtaattagtaagttaacaatagatgacttacaactaatcggaaggtgcagagactcgacgggagctaccctaacgtcaagacgagggtaaagagagagtccaattctcaaagcca

SEQ ID NO: 136 - DNA, 228 bp, Anabaena sp.
acggacttaaataattgagccttaaagaagaaattctttaagtggatgctctcaaactcagggaaacctaaatctagttatagacaaggcaatcctgagccaagccgaagtagtaattagtaagttaacaatagatgacttacaactaatcggaaggtgcagagactcgacgggagctaccctaacgtcaagacgagggtaaagagagagtccaattctcaaagccaa

SEQ ID NO: 137 - DNA, 229 bp, Anabaena sp.
acggacttaaataattgagccttaaagaagaaattctttaagtggatgctctcaaactcagggaaacctaaatctagttatagacaaggcaatcctgagccaagccgaagtagtaattagtaagttaacaatagatgacttacaactaatcggaaggtgcagagactcgacgggagctaccctaacgtcaagacgagggtaaagagagagtccaattctcaaagccaat

SEQ ID NO: 138 - DNA, 230 bp, Anabaena sp.
acggacttaaataattgagccttaaagaagaaattctttaagtggatgctctcaaactcagggaaacctaaatctagttatagacaaggcaatcctgagccaagccgaagtagtaattagtaagttaacaatagatgacttacaactaatcggaaggtgcagagactcgacgggagctaccctaacgtcaagacgagggtaaagagagagtccaattctcaaagccaata

SEQ ID NO: 139 - DNA, 239 bp, Anabaena sp.
acggacttaaataattgagccttaaagaagaaattctttaagtggatgctctcaaactcagggaaacctaaatctagttatagacaaggcaatcctgagccaagccgaagtagtaattagtaagttaacaatagatgacttacaactaatcggaaggtgcagagactcgacgggagctaccctaacgtcaagacgagggtaaagagagagtccaattctcaaagccaataggcagtagc

SEQ ID NO: 140 - DNA, 240 bp, Anabaena sp.
acggacttaaataattgagccttaaagaagaaattctttaagtggatgctctcaaactcagggaaacctaaatctagttatagacaaggcaatcctgagccaagccgaagtagtaattagtaagttaacaatagatgacttacaactaatcggaaggtgcagagactcgacgggagctaccctaacgtcaagacgagggtaaagagagagtccaattctcaaagccaataggcagtagcg

SEQ ID NO: 141 - DNA, 241 bp, Anabaena sp.
acggacttaaataattgagccttaaagaagaaattctttaagtggatgctctcaaactcagggaaacctaaatctagttatagacaaggcaatcctgagccaagccgaagtagtaattagtaagttaacaatagatgacttacaactaatcggaaggtgcagagactcgacgggagctaccctaacgtcaagacgagggtaaagagagagtccaattctcaaagccaataggcagtagcga

SEQ ID NO: 142 - DNA, 242 bp, Anabaena sp.
acggacttaaataattgagccttaaagaagaaattctttaagtggatgctctcaaactcagggaaacctaaatctagttatagacaaggcaatcctgagccaagccgaagtagtaattagtaagttaacaatagatgacttacaactaatcggaaggtgcagagactcgacgggagctaccctaacgtcaagacgagggtaaagagagagtccaattctcaaagccaataggcagtagcgaa

SEQ ID NO: 143 - DNA, 243 bp, Anabaena sp.
acggacttaaataattgagccttaaagaagaaattctttaagtggatgctctcaaactcagggaaacctaaatctagttatagacaaggcaatcctgagccaagccgaagtagtaattagtaagttaacaatagatgacttacaactaatcggaaggtgcagagactcgacgggagctaccctaacgtcaagacgagggtaaagagagagtccaattctcaaagccaataggcagtagcgaaa

SEQ ID NO: 144 - DNA, 244 bp, Anabaena sp.
acggacttaaataattgagccttaaagaagaaattctttaagtggatgctctcaaactcagggaaacctaaatctagttatagacaaggcaatcctgagccaagccgaagtagtaattagtaagttaacaatagatgacttacaactaatcggaaggtgcagagactcgacgggagctaccctaacgtcaagacgagggtaaagagagagtccaattctcaaagccaataggcagtagcgaaag

SEQ ID NO: 145 - DNA, 248 bp, Anabaena sp.
acggacttaaataattgagccttaaagaagaaattctttaagtggatgctctcaaactcagggaaacctaaatctagttatagacaaggcaatcctgagccaagccgaagtagtaattagtaagttaacaatagatgacttacaactaatcggaaggtgcagagactcgacgggagctaccctaacgtcaagacgagggtaaagagagagtccaattctcaaagccaataggcagtagcgaaagctgc

SEQ ID NO: 146 - DNA, 249 bp, Anabaena sp.
acggacttaaataattgagccttaaagaagaaattctttaagtggatgctctcaaactcagggaaacctaaatctagttatagacaaggcaatcctgagccaagccgaagtagtaattagtaagttaacaatagatgacttacaactaatcggaaggtgcagagactcgacgggagctaccctaacgtcaagacgagggtaaagagagagtccaattctcaaagccaataggcagtagcgaaagctgca

SEQ ID NO: 147 - DNA, 250 bp, Anabaena sp.
acggacttaaataattgagccttaaagaagaaattctttaagtggatgctctcaaactcagggaaacctaaatctagttatagacaaggcaatcctgagccaagccgaagtagtaattagtaagttaacaatagatgacttacaactaatcggaaggtgcagagactcgacgggagctaccctaacgtcaagacgagggtaaagagagagtccaattctcaaagccaataggcagtagcgaaagctgcaa

SEQ ID NO: 148 - DNA, 231 bp, Anabaena sp.
acggacttaaataattgagccttaaagaagaaattctttaagtggatgctctcaaactcagggaaacctaaatctagttatagacaaggcaatcctgagccaagccgaagtagtaattagtaagttaacaatagatgacttacaactaatcggaaggtgcagagactcgacgggagctaccctaacgtcaagacgagggtaaagagagagtccaattctcaaagccaatag

SEQ ID NO: 149 - DNA, 233 bp, Anabaena sp.
acggacttaaataattgagccttaaagaagaaattctttaagtggatgctctcaaactcagggaaacctaaatctagttatagacaaggcaatcctgagccaagccgaagtagtaattagtaagttaacaatagatgacttacaactaatcggaaggtgcagagactcgacgggagctaccctaacgtcaagacgagggtaaagagagagtccaattctcaaagccaataggc

SEQ ID NO: 150 - DNA, 234 bp, Anabaena sp.
acggacttaaataattgagccttaaagaagaaattctttaagtggatgctctcaaactcagggaaacctaaatctagttatagacaaggcaatcctgagccaagccgaagtagtaattagtaagttaacaatagatgacttacaactaatcggaaggtgcagagactcgacgggagctaccctaacgtcaagacgagggtaaagagagagtccaattctcaaagccaataggca

SEQ ID NO: 151 - DNA, 104 bp, Azoarcus sp.
tgcgccgatgaaggtgtagagactagacggcacccacctaaggcaaacgctatggtgaaggcatagtccagggagtggcgaaagtcacacaaaccggaatccgt

SEQ ID NO: 152 - DNA, 141 bp, Azoarcus sp.
ccgggcgtatggcaacgccgagccaagcttcggcgcctgcgccgatgaaggtgtagagactagacggcacccacctaaggcaaacgctatggtgaaggcatagtccagggagtggcgaaagtcacacaaaccggaatccgt

SEQ ID NO: 153 - DNA, 78 bp, Azoarcus sp.
acggcacccacctaaggcaaacgctatggtgaaggcatagtccagggagtggcgaaagtcacacaaaccggaatccgt

SEQ ID NO: 154 - DNA, 58 bp, Azoarcus sp.
acgctatggtgaaggcatagtccagggagtggcgaaagtcacacaaaccggaatccgt

SEQ ID NO: 155 - DNA, 75 bp, Thiomargarita sp.
attaaagttatagaattatcagagaatgatatagtccaagccttatggtaacatgagggcacttgaccctggtag

SEQ ID NO: 156 - DNA, 195 bp, Staphylococcus virus Twort
aagatgtaggcaatcctgagctaagctcttagtaataagagaaagtgcaacgactattccgataggaagtagggtcaagtgactcgaaatggggattacccttctagggtagtgatatagtctgaacatatatggaaacatatagaaggataggagtaacgaacctattcgtaacataattgaacttttagttat

SEQ ID NO: 157 - DNA, 163 bp, Staphylococcus virus Twort
taataagagaaagtgcaacgactattccgataggaagtagggtcaagtgactcgaaatggggattacccttctagggtagtgatatagtctgaacatatatggaaacatatagaaggataggagtaacgaacctattcgtaacataattgaacttttagttat

SEQ ID NO: 158 - DNA, 133 bp, Staphylococcus virus Twort
taggaagtagggtcaagtgactcgaaatggggattacccttctagggtagtgatatagtctgaacatatatggaaacatatagaaggataggagtaacgaacctattcgtaacataattgaacttttagttat

SEQ ID NO: 159 - DNA, 92 bp, Staphylococcus virus Twort
ctagggtagtgatatagtctgaacatatatggaaacatatagaaggataggagtaacgaacctattcgtaacataattgaacttttagttat

SEQ ID NO: 160 - DNA, 92 bp, Unknown
  source: /note="Description of Unknown: LSUp1 sequence"
agttaataaagatgatgaaatagtctgaaccattttgagaaaagtggaaataaaagaaaatcttttatgataacataaattgaacaggctaa

SEQ ID NO: 161 - DNA, 62 bp, Unknown
  source: /note="Description of Unknown: Bacteriophage Phi I sequence"
caaagactgatgatatagtccgacactcctagtaataggagaatacagaaaggatgaaatcc

SEQ ID NO: 162 - DNA, 76 bp, Nostoc sp.
agtcgagggtaaagggagagtccaattctcaaagcctattggcagtagcgaaagctgcgggagaatgaaaatccgt

SEQ ID NO: 163 - DNA, 76 bp, Nostoc sp.
agccgagggtaaagggagagtccaattctcaaagccaataggcagtagcgaaagctgcgggagaatgaaaatccgt

SEQ ID NO: 164 - DNA, 89 bp, Nodularia sp.
agccgagggtaaagggagagtccaattctcaaagccgaaggttattaaaacctggcagcagtgaaagctgcgggagaatgaaaatccgt

SEQ ID NO: 165 - DNA, 79 bp, Pleurocapsa sp.
agctgagggtaaagagagagtccaattctcaaagccagcagatggcagtagcgaaagctgcgggagaatgaaaatccgt

SEQ ID NO: 166 - DNA, 76 bp, Planktothrix sp.
agccgagggtaaagagagagtccaattctcaaagccaattggtagtagcgaaagctacgggagaatgaaaatccgt

SEQ ID NO: 167 - DNA, 118 bp, Azoarcus sp.
gcggactcatatttcgatgtgccttgcgccgggaaaccacgcaagggatggtgtcaaattcggcgaaacctaagcgcccgcccgggcgtatggcaacgccgagccaagcttcggcgcc

SEQ ID NO: 168 - DNA, 81 bp, Azoarcus sp.
gcggactcatatttcgatgtgccttgcgccgggaaaccacgcaagggatggtgtcaaattcggcgaaacctaagcgcccgc

SEQ ID NO: 169 - DNA, 144 bp, Azoarcus sp.
gcggactcatatttcgatgtgccttgcgccgggaaaccacgcaagggatggtgtcaaattcggcgaaacctaagcgcccgcccgggcgtatggcaacgccgagccaagcttcggcgcctgcgccgatgaaggtgtagagactag

SEQ ID NO: 170 - DNA, 164 bp, Azoarcus sp.
gcggactcatatttcgatgtgccttgcgccgggaaaccacgcaagggatggtgtcaaattcggcgaaacctaagcgcccgcccgggcgtatggcaacgccgagccaagcttcggcgcctgcgccgatgaaggtgtagagactagacggcacccacctaaggcaa

SEQ ID NO: 171 - DNA, 179 bp, Thiomargarita sp.
aggattagatactacactaagtgtcccccagactggtgacagtctggtgtgcatccagctatatcggtgaaaccccattggggtaataccgagggaagctatattatatatatattaataaatagccccgtagagactatgtaggtaaggagatagaagatgataaaatcaaaatcatc

SEQ ID NO: 172 - DNA, 84 bp, Staphylococcus virus Twort
actactgaaagcataaataattgtgcctttatacagtaatgtatatcgaaaaatcctctaattcagggaacacctaaacaaact

SEQ ID NO: 173 - DNA, 116 bp, Staphylococcus virus Twort
actactgaaagcataaataattgtgcctttatacagtaatgtatatcgaaaaatcctctaattcagggaacacctaaacaaactaagatgtaggcaatcctgagctaagctcttag

SEQ ID NO: 174 - DNA, 146 bp, Staphylococcus virus Twort
actactgaaagcataaataattgtgcctttatacagtaatgtatatcgaaaaatcctctaattcagggaacacctaaacaaactaagatgtaggcaatcctgagctaagctcttagtaataagagaaagtgcaacgactattccga

SEQ ID NO: 175 - DNA, 187 bp, Staphylococcus virus Twort
actactgaaagcataaataattgtgcctttatacagtaatgtatatcgaaaaatcctctaattcagggaacacctaaacaaactaagatgtaggcaatcctgagctaagctcttagtaataagagaaagtgcaacgactattccgataggaagtagggtcaagtgactcgaaatggggattaccctt

SEQ ID NO: 176 - DNA, 216 bp, Unknown
  source: /note="Description of Unknown: LSUp1 sequence"
cgctagggatttataactgtgagtcctccaatattataaaatgttggtaatatattgggtaaatttcaaagacaacttttctccacgtcaggatatagtgtatttgaagcgaaacttattttagcagtgaaaaagcaaataaggacgttcaacgactaaaaggtgagtattgctaacaataatccttttttttaatgcccaacatctttattaact

SEQ ID NO: 177 - DNA, 559 bp, Unknown
  source: /note="Description of Unknown: Bacteriophage Phi I sequence"
gtgggtgcataaactatttcattgtgcacattaaatctggtgaactcggtgaaaccctaatggggcaataccgagccaagccatagggaggatatatgagaggcaagaagttaattcttgaggccactgagactggctgtatcatccctacgtcacacaaacttaatgccgatggttatttcagaaagaaaaccaatggcgtcttagagatgtatcacagaacggtgtggaaggagcataacggagacatacctgatggcttcgagatagaccataagtgtcgcaatagggcttgctgtaatatagagcatttacagatgcttgagggtacagcccacactgttaagaccaatcgtgaacgctacgcagacagaaaggaaacagctagggaatactggctggagactggatgtaccggcctagcactcggtgagaagtttggtgtgtcgttctcttctgcttgtaagtggattagagaatggaaggcgtagagactatccgaaaggagtagggccgagggtgagactccctcgtaacccgaagcgccagacagtcaact

SEQ ID NO: 178 - DNA, 218 bp, Nostoc sp.
acggacttaagtaattgagccttaaagaagaaattctttaagtggcagctctcaaactcagggaaacctaaatctgttcacagacaaggcaatcctgagccaagccgaaagagtcatgagtgctgagtagtgagtaaaataaaagctcacaactcagaggttgtaactctaagctagtcggaaggtgcagagactcgacgggagctaccctaacgtaa

SEQ ID NO: 179 - DNA, 165 bp, Nostoc sp.
acggacttaaactgaattgagccttagagaagaaattctttaagtgtcagctctcaaactcagggaaacctaaatctgttgacagacaaggcaatcctgagccaagccgagaactctaagttattcggaaggtgcagagactcgacgggagctaccctaacgtca

SEQ ID NO: 180 - DNA, 181 bp, Nodularia sp.
acggacttagaaaactgagccttgatcgagaaatctttcaagtggaagctctcaaattcagggaaacctaaatctgtttacagatatggcaatcctgagccaagccgaaacaagtcctgagtgttaaagctcataactcatcggaaggtgcagagactcgacgggagctaccctaacgtta

SEQ ID NO: 181 - DNA, 188 bp, Pleurocapsa sp.
acggacttaaaaaaattgagccttggcagagaaatctgtcatgcgaacgctctcaaattcagggaaacctaagtctggcaacagatatggcaatcctgagccaagccttaatcaaggaaaaaaacatttttaccttttaccttgaaaggaaggtgcagagactcaacgggagctaccctaacaggtca

SEQ ID NO: 182 - DNA, 200 bp, Planktothrix sp.
acggacttaaagataaattgagccttgaggcgagaaatctctcaagtgtaagctgtcaaattcagggaaacctaaatctgtaaattcagacaaggcaatcctgagccaagcctaggggtattagaaatgagggagtttccccaatctaagatcaatacctaggaaggtgcagagactcgacgggagctaccctaacgtta

SEQ ID NO: 183 - DNA, 166 bp, Artificial Sequence
  source: /note="Description of Artificial Sequence: Synthetic polynucleotide"
agtatataagaaacaaaccactagatgacttacaactaatcggaaggtgcagagactcgacgggagctaccctaacgtcaagacgagggtaaagagagagtccaattctcaaagccaataggcagtagcgaaagctgcaagagaatgaaaatccgtggctcgcagc

SEQ ID NO: 184 - DNA, 176 bp, Artificial Sequence
  source: /note="Description of Artificial Sequence: Synthetic polynucleotide"
ctgaaattatacttatactcaaacaaaccactagatgacttacaactaatcggaaggtgcagagactcgacgggagctaccctaacgtcaagacgagggtaaagagagagtccaattctcaaagccaataggcagtagcgaaagctgcaagagaatgaaaatccgtggctcgcagc

SEQ ID NO: 185 - DNA, 186 bp, Artificial Sequence
  source: /note="Description of Artificial Sequence: Synthetic polynucleotide"
ctgaaattatacttatactcagtatatgacaaacaaaccactagatgacttacaactaatcggaaggtgcagagactcgacgggagctaccctaacgtcaagacgagggtaaagagagagtccaattctcaaagccaataggcagtagcgaaagctgcaagagaatgaaaatccgtggctcgcagc

SEQ ID NO: 186 - DNA, 196 bp, Artificial Sequence
  source: /note="Description of Artificial Sequence: Synthetic polynucleotide"
catcaacaatatgaaattatacttatactcagtatatgacaaacaaaccactagatgacttacaactaatcggaaggtgcagagactcgacgggagctaccctaacgtcaagacgagggtaaagagagagtccaattctcaaagccaataggcagtagcgaaagctgcaagagaatgaaaatccgtggctcgcagc

SEQ ID NO: 187 - DNA, 206 bp, Artificial Sequence
  source: /note="Description of Artificial Sequence: Synthetic polynucleotide"
catcaacaatatgaaactatacttatactcagtatatgaagcattatcgcaaacaaaccactagatgacttacaactaatcggaaggtgcagagactcgacgggagctaccctaacgtcaagacgagggtaaagagagagtccaattctcaaagccaataggcagtagcgaaagctgcaagagaatgaaaatccgtggctcgcagc

SEQ ID NO: 188 - DNA, 166 bp, Artificial Sequence
  source: /note="Description of Artificial Sequence: Synthetic polynucleotide"
tagcgtcagcaaacaaacaaatagatgacttacaactaatcggaaggtgcagagactcgacgggagctaccctaacgtcaagacgagggtaaagagagagtccaattctcaaagccaataggcagtagcgaaagctgcaagagaatgaaaatccgtggctcgcagc

SEQ ID NO: 189 - DNA, 176 bp, Artificial Sequence
  source: /note="Description of Artificial Sequence: Synthetic polynucleotide"
atactcatactagcgtcagcaaacaaacaaatagatgacttacaactaatcggaaggtgcagagactcgacgggagctaccctaacgtcaagacgagggtaaagagagagtccaattctcaaagccaataggcagtagcgaaagctgcaagagaatgaaaatccgtggctcgcagc

SEQ ID NO: 190 - DNA, 186 bp, Artificial Sequence
  source: /note="Description of Artificial Sequence: Synthetic polynucleotide"
gtgtgaagctatactcatactagcgtcagcaaacaaacaaatagatgacttacaactaatcggaaggtgcagagactcgacgggagctaccctaacgtcaagacgagggtaaagagagagtccaattctcaaagccaataggcagtagcgaaagctgcaagagaatgaaaatccgtggctcgcagc

SEQ ID NO: 191 - DNA, 196 bp, Artificial Sequence
  source: /note="Description of Artificial Sequence: Synthetic polynucleotide"
cctcacctgagtgtgaagctatactcatactagcgtcagcaaacaaacaaatagatgacttacaactaatcggaaggtgcagagactcgacgggagctaccctaacgtcaagacgagggtaaagagagagtccaattctcaaagccaataggcagtagcgaaagctgcaagagaatgaaaatccgtggctcgcagc

SEQ ID NO: 192 - DNA, 206 bp, Artificial Sequence
  source: /note="Description of Artificial Sequence: Synthetic polynucleotide"
ccgaatgatgcctcacctgagtgtgaagctatactcatactagcgtcagcaaacaaacaaatagatgacttacaactaatcggaaggtgcagagactcgacgggagctaccctaacgtcaagacgagggtaaagagagagtccaattctcaaagccaataggcagtagcgaaagctgcaagagaatgaaaatccgtggctcgcagc

SEQ ID NO: 193 - DNA, 166 bp, Artificial Sequence
  source: /note="Description of Artificial Sequence: Synthetic polynucleotide"
cggtgcgagcaaacaaacaaatagatgacttacaactaatcggaaggtgcagagactcgacgggagctaccctaacgtcaagacgagggtaaagagagagtccaattctcaaagccaataggcagtagcgaaagctgcaagagaatgaaaatccgtggctcgcagc

SEQ ID NO: 194 - DNA, 176 bp, Artificial Sequence
  source: /note="Description of Artificial Sequence: Synthetic polynucleotide"
cgctccgacccagtgcgagcaaacaaacaaatagatgacttacaactaatcggaaggtgcagagactcgacgggagctaccctaacgtcaagacgagggtaaagagagagtccaattctcaaagccaataggcagtagcgaaagctgcaagagaatgaaaatccgtggctcgcagc

SEQ ID NO: 195 - DNA, 186 bp, Artificial Sequence
  source: /note="Description of Artificial Sequence: Synthetic polynucleotide"
ctgaaattatactaatactcagtatatgacaaacaaaccactagatgacttacaactaatcggaaggtgcagagactcgacgggagctaccctaacgtcaagacgagggtaaagagagagtccaattctcaaagccaataggcagtagcgaaagctgcaagagaatgaaaatccgtggctcgcagc

SEQ ID NO: 196 - DNA, 186 bp, Artificial Sequence
  source: /note="Description of Artificial Sequence: Synthetic polynucleotide"
ctgaaaatatactaatactcactatatgacaaacaaaccactagatgacttacaactaatcggaaggtgcagagactcgacgggagctaccctaacgtcaagacgagggtaaagagagagtccaattctcaaagccaataggcagtagcgaaagctgcaagagaatgaaaatccgtggctcgcagc

SEQ ID NO: 197 - DNA, 186 bp, Artificial Sequence
  source: /note="Description of Artificial Sequence: Synthetic polynucleotide"
ctgataatatagtaatactcactatatgacaaacaaaccactagatgacttacaactaatcggaaggtgcagagactcgacgggagctaccctaacgtcaagacgagggtaaagagagagtccaattctcaaagccaataggcagtagcgaaagctgcaagagaatgaaaatccgtggctcgcagc

SEQ ID NO: 198 - DNA, 186 bp, Artificial Sequence
  source: /note="Description of Artificial Sequence: Synthetic polynucleotide"
ctgataataaagtaatacacactataagacaaacaaaccactagatgacttacaactaatcggaaggtgcagagactcgacgggagctaccctaacgtcaagacgagggtaaagagagagtccaattctcaaagccaataggcagtagcgaaagctgcaagagaatgaaaatccgtggctcgcagc

SEQ ID NO: 199 - DNA, 186 bp, Artificial Sequence
  source: /note="Description of Artificial Sequence: Synthetic polynucleotide"
ctgaaattatacttatactctctaagttacaaacaaaccactagatgacttacaactaatcggaaggtgcagagactcgacgggagctaccctaacgtcaagacgagggtaaagagagagtccaattctcaaagccaataggcagtagcgaaagctgcaagagaatgaaaatccgtggctcgcagc

SEQ ID NO: 200 - DNA, 186 bp, Artificial Sequence
  source: /note="Description of Artificial Sequence: Synthetic polynucleotide"
ctgaaattatgtgtgttacatctaagttacaaacaaaccactagatgacttacaactaatcggaaggtgcagagactcgacgggagctaccctaacgtcaagacgagggtaaagagagagtccaattctcaaagccaataggcagtagcgaaagctgcaagagaatgaaaatccgtggctcgcagc

SEQ ID NO: 201 - DNA, 186 bp, Artificial Sequence
  source: /note="Description of Artificial Sequence: Synthetic polynucleotide"
gttgatcggtgtgtgttacatctaagttacaaacaaaccactagatgacttacaactaatcggaaggtgcagagactcgacgggagctaccctaacgtcaagacgagggtaaagagagagtccaattctcaaagccaataggcagtagcgaaagctgcaagagaatgaaaatccgtggctcgcagc

SEQ ID NO: 202 - DNA, 186 bp, Artificial Sequence
  source: /note="Description of Artificial Sequence: Synthetic polynucleotide"
ctgaaattatacttatactcagtatatgacaaacaaaccactagatgacttacaactaatcggaaggtgcagagactcgacgggagctaccctaacgtcaagacgagggtaaagagagagtccaattctcaaagccaataggcagtagcgaaagctgcaagagaatgaaaatccgtgattaaacag

SEQ ID NO: 203 - DNA, 196 bp, Artificial Sequence
  source: /note="Description of Artificial Sequence: Synthetic polynucleotide"
ctgaaattatacttatactcagtatatgacaaacaaaccactagatgacttacaactaatcggaaggtgcagagactcgacgggagctaccctaacgtcaagacgagggtaaagagagagtccaattctcaaagccaataggcagtagcgaaagctgcaagagaatgaaaatccgtgattcacaatataaattacg

SEQ ID NO: 204 - DNA, 186 bp, Artificial Sequence
  source: /note="Description of Artificial Sequence: Synthetic polynucleotide"
ctgaaattatacttatactcagtatatgacaaacaaaccactagatgacttacaactaatcggaaggtgcagagactcgacgggagctaccctaacgtcaagacgagggtaaagagagagtccaattctcaaagccaataggcagtagcgaaagctgcaagagaatgaaaatccgtggatcatagc

SEQ ID NO: 205 - DNA, 196 bp, Artificial Sequence
  source: /note="Description of Artificial Sequence: Synthetic polynucleotide"
ctgaaattatacttatactcagtatatgacaaacaaaccactagatgacttacaactaatcggaaggtgcagagactcgacgggagctaccctaacgtcaagacgagggtaaagagagagtccaattctcaaagccaataggcagtagcgaaagctgcaagagaatgaaaatccgtggatcgcagcataatatccg

SEQ ID NO: 206 - DNA, 196 bp, Artificial Sequence
  source: /note="Description of Artificial Sequence: Synthetic polynucleotide"
ctgaaattatacttatactcagtatatgacaaacaaaccactagatgacttacaactaatcggaaggtgcagagactcgacgggagctaccctaacgtcaagacgagggtaaagagagagtccaattctcaaagccaataggcagtagcgaaagctgcaagagaatgaaaatccgtggctcgcagcgcgcctaccg

SEQ ID NO: 207 - DNA, 219 bp, Artificial Sequence
  source: /note="Description of Artificial Sequence: Synthetic polynucleotide"
ctgaaattatacttatactcagtatatgacaaacaaaccactagatgacttacaactaatcggaaggtgcagagactcgacgggagctaccctaacgtcaagacgagggtaaagagagagtccaattctcaaagccaataggcagtagcgaaagctgcaagagaatgaaaatccgtggctcgcagcgcgcctaccgaaagccggcgtcgacgttagcgc

SEQ ID NO: 208 - DNA, 219 bp, Artificial Sequence
  source: /note="Description of Artificial Sequence: Synthetic polynucleotide"
ctgaaattatacttatactcagtatatgacaaacaaaccactagatgacttacaactaatcggaaggtgcagagactcgacgggagctaccctaacgtcaagacgagggtaaagagagagtccaattctcaaagccaataggcagtagcgaaagctgcaagagaatgaaaatccgtggatcgcagcataatatccgaaacgaggatacaagtgacatgc

SEQ ID NO: 209 - DNA, 219 bp, Artificial Sequence
  source: /note="Description of Artificial Sequence: Synthetic polynucleotide"
ctgaaattatacttatactcagtatatgacaaacaaaccactagatgacttacaactaatcggaaggtgcagagactcgacgggagctaccctaacgtcaagacgagggtaaagagagagtccaattctcaaagccaataggcagtagcgaaagctgcaagagaatgaaaatccgtgattcacaatctaaattacgaaacgataaatgataactctaac

SEQ ID NO: 210 - DNA, 156 bp, Artificial Sequence
  source: /note="Description of Artificial Sequence: Synthetic polynucleotide"
aaacaaaccactagatgacttacaactaatcggaaggtgcagagactcgacgggagctaccctaacgtcaagacgagggtaaagagagagtccaattctcaaagccaataggcagtagcgaaagctgcaagagaatgaaaatccgtggctcgcagc

SEQ ID NO: 211 - DNA, 161 bp, Artificial Sequence
  source: /note="Description of Artificial Sequence: Synthetic polynucleotide"
cgggcaaacaaacaaatagatgacttacaactaatcggaaggtgcagagactcgacgggagctaccctaacgtcaagacgagggtaaagagagagtccaattctcaaagccaataggcagtagcgaaagctgcaagagaatgaaaatccgtggctcgcagc

SEQ ID NO: 212 - DNA, 186 bp, Artificial Sequence
  source: /note="Description of Artificial Sequence: Synthetic polynucleotide"
cgctccgacgagcttccggccagtgcgagcaaacaaacaaatagatgacttacaactaatcggaaggtgcagagactcgacgggagctaccctaacgtcaagacgagggtaaagagagagtccaattctcaaagccaataggcagtagcgaaagctgcaagagaatgaaaatccgtggctcgcagc

SEQ ID NO: 213 - DNA, 57 bp, Artificial Sequence
  source: /note="Description of Artificial Sequence: Synthetic oligonucleotide"
aaacaaaccacggcagtagcgaaagctgcaagagaatgaaaatccgtggctcgcagc

SEQ ID NO: 214 - DNA, 67 bp, Artificial Sequence
  source: /note="Description of Artificial Sequence: Synthetic oligonucleotide"
agtatataagaaacaaaccacggcagtagcgaaagctgcaagagaatgaaaatccgtggctcgcagc

SEQ ID NO: 215 - DNA, 77 bp, Artificial Sequence
  source: /note="Description of Artificial Sequence: Synthetic oligonucleotide"
ctgaaattatacttatactcaaacaaaccacggcagtagcgaaagctgcaagagaatgaaaatccgtggctcgcagc

SEQ ID NO: 216 - DNA, 87 bp, Artificial Sequence
  source: /note="Description of Artificial Sequence: Synthetic oligonucleotide"
ctgaaattatacttatactcagtatatgacaaacaaaccacggcagtagcgaaagctgcaagagaatgaaaatccgtggctcgcagc

SEQ ID NO: 217 - DNA, 67 bp, Artificial Sequence
  source: /note="Description of Artificial Sequence: Synthetic oligonucleotide"
tagcgtcagcaaacaaacaaaggcagtagcgaaagctgcaagagaatgaaaatccgtggctcgcagc

SEQ ID NO: 218 - DNA, 77 bp, Artificial Sequence
  source: /note="Description of Artificial Sequence: Synthetic oligonucleotide"
atactcatactagcgtcagcaaacaaacaaaggcagtagcgaaagctgcaagagaatgaaaatccgtggctcgcagc

SEQ ID NO: 219 - DNA, 87 bp, Artificial Sequence
  source: /note="Description of Artificial Sequence: Synthetic oligonucleotide"
gtgtgaagctatactcatactagcgtcagcaaacaaacaaaggcagtagcgaaagctgcaagagaatgaaaatccgtggctcgcagc

SEQ ID NO: 220 - DNA, 67 bp, Artificial Sequence
  source: /note="Description of Artificial Sequence: Synthetic oligonucleotide"
cggtgcgagcaaacaaacaaaggcagtagcgaaagctgcaagagaatgaaaatccgtggctcgcagc

SEQ ID NO: 221 - DNA, 77 bp, Artificial Sequence
  source: /note="Description of Artificial Sequence: Synthetic oligonucleotide"
cgctccgacccagtgcgagcaaacaaacaaaggcagtagcgaaagctgcaagagaatgaaaatccgtggctcgcagc

SEQ ID NO: 222 - DNA, 87 bp, Artificial Sequence
  source: /note="Description of Artificial Sequence: Synthetic oligonucleotide"
cgctccgacgagcttccggccagtgcgagcaaacaaacaaaggcagtagcgaaagctgcaagagaatgaaaatccgtggctcgcagc

SEQ ID NO: 223 - DNA, 98 bp, Artificial Sequence
  source: /note="Description of Artificial Sequence: Synthetic oligonucleotide"
aaacaaaccacaagacgagggtaaagagagagtccaattctcaaagccaataggcagtagcgaaagctgcaagagaatgaaaatccgtggctcgcagc

SEQ ID NO: 224 - DNA, 108 bp, Artificial Sequence
  source: /note="Description of Artificial Sequence: Synthetic polynucleotide"
agtatataagaaacaaaccacaagacgagggtaaagagagagtccaattctcaaagccaataggcagtagcgaaagctgcaagagaatgaaaatccgtggctcgcagc

SEQ ID NO: 225 - DNA, 118 bp, Artificial Sequence
  source: /note="Description of Artificial Sequence: Synthetic polynucleotide"
ctgaaattatacttatactcaaacaaaccacaagacgagggtaaagagagagtccaattctcaaagccaataggcagtagcgaaagctgcaagagaatgaaaatccgtggctcgcagc

SEQ ID NO: 226 - DNA, 128 bp, Artificial Sequence
  source: /note="Description of Artificial Sequence: Synthetic polynucleotide"
ctgaaattatacttatactcagtatatgacaaacaaaccacaagacgagggtaaagagagagtccaattctcaaagccaataggcagtagcgaaagctgcaagagaatgaaaatccgtggctcgcagc

SEQ ID NO: 227 - DNA, 108 bp, Artificial Sequence
  source: /note="Description of Artificial Sequence: Synthetic polynucleotide"
tagcgtcagcaaacaaacaaaaagacgagggtaaagagagagtccaattctcaaagccaataggcagtagcgaaagctgcaagagaatgaaaatccgtggctcgcagc

SEQ ID NO: 228 - DNA, 118 bp, Artificial Sequence
  source: /note="Description of Artificial Sequence: Synthetic polynucleotide"
atactcatactagcgtcagcaaacaaacaaaaagacgagggtaaagagagagtccaattctcaaagccaataggcagtagcgaaagctgcaagagaatgaaaatccgtggctcgcagc

SEQ ID NO: 229 - DNA, 128 bp, Artificial Sequence
  source: /note="Description of Artificial Sequence: Synthetic polynucleotide"
gtgtgaagctatactcatactagcgtcagcaaacaaacaaaaagacgagggtaaagagagagtccaattctcaaagccaataggcagtagcgaaagctgcaagagaatgaaaatccgtggctcgcagc

SEQ ID NO: 230 - DNA, 108 bp, Artificial Sequence
  source: /note="Description of Artificial Sequence: Synthetic polynucleotide"
cggtgcgagcaaacaaacaaaaagacgagggtaaagagagagtccaattctcaaagccaataggcagtagcgaaagctgcaagagaatgaaaatccgtggctcgcagc

SEQ ID NO: 231 - DNA, 118 bp, Artificial Sequence
  source: /note="Description of Artificial Sequence: Synthetic polynucleotide"
cgctccgacccagtgcgagcaaacaaacaaaaagacgagggtaaagagagagtccaattctcaaagccaataggcagtagcgaaagctgcaagagaatgaaaatccgtggctcgcagc

SEQ ID NO: 232 - DNA, 128 bp, Artificial Sequence
  source: /note="Description of Artificial Sequence: Synthetic polynucleotide"
cgctccgacgagcttccggccagtgcgagcaaacaaacaaaaagacgagggtaaagagagagtccaattctcaaagccaataggcagtagcgaaagctgcaagagaatgaaaatccgtggctcgcagc

SEQ ID NO: 233 - DNA, 176 bp, Artificial Sequence
  source: /note="Description of Artificial Sequence: Synthetic polynucleotide"
ctgaaattatacttatactcagtatatgacaaacaaaccactagatgacttacaactaatcggaaggtgcagagactcgacgggagctaccctaacgtcaagacgagggtaaagagagagtccaattctcaaagccaataggcagtagcgaaagctgcaagagaatgaaaatccgt

SEQ ID NO: 234 - DNA, 77 bp, Artificial Sequence
  source: /note="Description of Artificial Sequence: Synthetic oligonucleotide"
ctgaaattatacttatactcagtatatgacaaacaaaccacggcagtagcgaaagctgcaagagaatgaaaatccgt

SEQ ID NO: 235 - DNA, 87 bp, Artificial Sequence
  source: /note="Description of Artificial Sequence: Synthetic oligonucleotide"
ctgaaattatacttatactcagtatatgacaaacaaaccacggcagtagcgaaagctgcaagagaatgaaaatccgtgattaaacag

SEQ ID NO: 236 - DNA, 97 bp, Artificial Sequence
  source: /note="Description of Artificial Sequence: Synthetic oligonucleotide"
ctgaaattatacttatactcagtatatgacaaacaaaccacggcagtagcgaaagctgcaagagaatgaaaatccgtgattcacaatataaattacg

SEQ ID NO: 237 - DNA, 87 bp, Artificial Sequence
  source: /note="Description of Artificial Sequence: Synthetic oligonucleotide"
ctgaaattatacttatactcagtatatgacaaacaaaccacggcagtagcgaaagctgcaagagaatgaaaatccgtggatcatagc

SEQ ID NO: 238 - DNA, 97 bp, Artificial Sequence
  source: /note="Description of Artificial Sequence: Synthetic oligonucleotide"
ctgaaattatacttatactcagtatatgacaaacaaaccacggcagtagcgaaagctgcaagagaatgaaaatccgtggatcgcagcataatatccg

SEQ ID NO: 239 - DNA, 97 bp, Artificial Sequence
  source: /note="Description of Artificial Sequence: Synthetic oligonucleotide"
ctgaaattatacttatactcagtatatgacaaacaaaccacggcagtagcgaaagctgcaagagaatgaaaatccgtggctcgcagcgcgcctaccg

SEQ ID NO: 240 - DNA, 118 bp, Artificial Sequence
  source: /note="Description of Artificial Sequence: Synthetic polynucleotide"
ctgaaattatacttatactcagtatatgacaaacaaaccacaagacgagggtaaagagagagtccaattctcaaagccaataggcagtagcgaaagctgcaagagaatgaaaatccgt

SEQ ID NO: 241 - DNA, 128 bp, Artificial Sequence
  source: /note="Description of Artificial Sequence: Synthetic polynucleotide"
ctgaaattatacttatactcagtatatgacaaacaaaccacaagacgagggtaaagagagagtccaattctcaaagccaataggcagtagcgaaagctgcaagagaatgaaaatccgtgattaaacag

SEQ ID NO: 242 - DNA, 138 bp, Artificial Sequence
  source: /note="Description of Artificial Sequence: Synthetic polynucleotide"
ctgaaattatacttatactcagtatatgacaaacaaaccacaagacgagggtaaagagagagtccaattctcaaagccaataggcagtagcgaaagctgcaagagaatgaaaatccgtgattcacaatataaattacg

SEQ ID NO: 243 - DNA, 128 bp, Artificial Sequence
  source: /note="Description of Artificial Sequence: Synthetic polynucleotide"
ctgaaattatacttatactcagtatatgacaaacaaaccacaagacgagggtaaagagagagtccaattctcaaagccaataggcagtagcgaaagctgcaagagaatgaaaatccgtggatcatagc

SEQ ID NO: 244 - DNA, 138 bp, Artificial Sequence
  source: /note="Description of Artificial Sequence: Synthetic polynucleotide"
ctgaaattatacttatactcagtatatgacaaacaaaccacaagacgagggtaaagagagagtccaattctcaaagccaataggcagtagcgaaagctgcaagagaatgaaaatccgtggatcgcagcataatatccg

SEQ ID NO: 245 - DNA, 138 bp, Artificial Sequence
  source: /note="Description of Artificial Sequence: Synthetic polynucleotide"
ctgaaattatacttatactcagtatatgacaaacaaaccacaagacgagggtaaagagagagtccaattctcaaagccaataggcagtagcgaaagctgcaagagaatgaaaatccgtggctcgcagcgcgcctaccg

SEQ ID NO: 246 - DNA, 162 bp, Artificial Sequence
  source: /note="Description of Artificial Sequence: Synthetic polynucleotide"
gctgcgagccacggacttaaataattgagccttaaagaagaaattctttaagtggatgctctcaaactcagggaaacctaaatctagttatagacaaggcaatcctgagccaagccgaagtagtaattagtaagttaacaacacaaacacaacttatatact

SEQ ID NO: 247 - DNA, 172 bp, Artificial Sequence
  source: /note="Description of Artificial Sequence: Synthetic polynucleotide"
gctgcgagccacggacttaaataattgagccttaaagaagaaattctttaagtggatgctctcaaactcagggaaacctaaatctagttatagacaaggcaatcctgagccaagccgaagtagtaattagtaagttaacaacacaaacacaagagtataagtataatttcag

SEQ ID NO: 248 - DNA, 182 bp, Artificial Sequence
  source: /note="Description of Artificial Sequence: Synthetic polynucleotide"
gctgcgagccacggacttaaataattgagccttaaagaagaaattctttaagtggatgctctcaaactcagggaaacctaaatctagttatagacaaggcaatcctgagccaagccgaagtagtaattagtaagttaacaacacaaacacaagtcatatactgagtataagtataatttcag

SEQ ID NO: 249 - DNA, 192 bp, Artificial Sequence
  source: /note="Description of Artificial Sequence: Synthetic polynucleotide"
gctgcgagccacggacttaaataattgagccttaaagaagaaattctttaagtggatgctctcaaactcagggaaacctaaatctagttatagacaaggcaatcctgagccaagccgaagtagtaattagtaagttaacaacacaaacacaagtcatatactgagtataagtataatttcatattgttgatg

SEQ ID NO: 250 - DNA, 202 bp, Artificial Sequence
  source: /note="Description of Artificial Sequence: Synthetic polynucleotide"
gctgcgagccacggacttaaataattgagccttaaagaagaaattctttaagtggatgctctcaaactcagggaaacctaaatctagttatagacaaggcaatcctgagccaagccgaagtagtaattagtaagttaacaacacaaacacaagcgataatgcttcatatactgagtataagtatagtttcatattgttgatg

SEQ ID NO: 251 - DNA, 162 bp, Artificial Sequence
  source: /note="Description of Artificial Sequence: Synthetic polynucleotide"
gctgcgagccacggacttaaataattgagccttaaagaagaaattctttaagtggatgctctcaaactcagggaaacctaaatctagttatagacaaggcaatcctgagccaagccgaagtagtaattagtaagttaacaaaacaaaaacaagctgacgcta

SEQ ID NO: 252 - DNA, 172 bp, Artificial Sequence
  source: /note="Description of Artificial Sequence: Synthetic polynucleotide"
gctgcgagccacggacttaaataattgagccttaaagaagaaattctttaagtggatgctctcaaactcagggaaacctaaatctagttatagacaaggcaatcctgagccaagccgaagtagtaattagtaagttaacaaaacaaaaacaagctgacgctagtatgagtat

SEQ ID NO: 253 - DNA, 182 bp, Artificial Sequence
  source: /note="Description of Artificial Sequence: Synthetic polynucleotide"
gctgcgagccacggacttaaataattgagccttaaagaagaaattctttaagtggatgctctcaaactcagggaaacctaaatctagttatagacaaggcaatcctgagccaagccgaagtagtaattagtaagttaacaaaacaaaaacaagctgacgctagtatgagtatagcttcacac

SEQ ID NO: 254 - DNA, 192 bp, Artificial Sequence
  source: /note="Description of Artificial Sequence: Synthetic polynucleotide"
gctgcgagccacggacttaaataattgagccttaaagaagaaattctttaagtggatgctctcaaactcagggaaacctaaatctagttatagacaaggcaatcctgagccaagccgaagtagtaattagtaagttaacaaaacaaaaacaagctgacgctagtatgagtatagcttcacactcaggtgagg

SEQ ID NO: 255 - DNA, 202 bp, Artificial Sequence
  source: /note="Description of Artificial Sequence: Synthetic polynucleotide"
gctgcgagccacggacttaaataattgagccttaaagaagaaattctttaagtggatgctctcaaactcagggaaacctaaatctagttatagacaaggcaatcctgagccaagccgaagtagtaattagtaagttaacaaaacaaaaacaagctgacgctagtatgagtatagcttcacactcaggtgaggcatcattcgg

SEQ ID NO: 256 - DNA, 162 bp, Artificial Sequence
  source: /note="Description of Artificial Sequence: Synthetic polynucleotide"
gctgcgagccacggacttaaataattgagccttaaagaagaaattctttaagtggatgctctcaaactcagggaaacctaaatctagttatagacaaggcaatcctgagccaagccgaagtagtaattagtaagttaacaaaacaaaaacaagctcgcaccg

SEQ ID NO: 257 - DNA, 172 bp, Artificial Sequence
  source: /note="Description of Artificial Sequence: Synthetic polynucleotide"
gctgcgagccacggacttaaataattgagccttaaagaagaaattctttaagtggatgctctcaaactcagggaaacctaaatctagttatagacaaggcaatcctgagccaagccgaagtagtaattagtaagttaacaaaacaaaaacaagctcgcactgggtcggagcg

SEQ ID NO: 258 - DNA, 182 bp, Artificial Sequence; identical to SEQ ID NO: 248
  source: /note="Description of Artificial Sequence: Synthetic polynucleotide"

SEQ ID NO: 259 - DNA, 182 bp, Artificial Sequence; identical to SEQ ID NO: 248
  source: /note="Description of Artificial Sequence: Synthetic polynucleotide"

SEQ ID NO: 260 - DNA, 182 bp, Artificial Sequence; identical to SEQ ID NO: 248
  source: /note="Description of Artificial Sequence: Synthetic polynucleotide"

SEQ ID NO: 261 - DNA, 182 bp, Artificial Sequence; identical to SEQ ID NO: 248
  source: /note="Description of Artificial Sequence: Synthetic polynucleotide"

SEQ ID NO: 262 - DNA, 182 bp, Artificial Sequence
  source: /note="Description of Artificial Sequence: Synthetic polynucleotide"
gctgcgagccacggacttaaataattgagccttaaagaagaaattctttaagtggatgctctcaaactcagggaaacctaaatctagttatagacaaggcaatcctgagccaagccgaagtagtaattagtaagttaacaacacaaacacaagtaacttagagagtataagtataatttcag

SEQ ID NO: 263 - DNA, 182 bp, Artificial Sequence
  source: /note="Description of Artificial Sequence: Synthetic polynucleotide"
gctgcgagccacggacttaaataattgagccttaaagaagaaattctttaagtggatgctctcaaactcagggaaacctaaatctagttatagacaaggcaatcctgagccaagccgaagtagtaattagtaagttaacaacacaaacacaagtaacttagatgtaacacacataatttcag

SEQ ID NO: 264 - DNA, 182 bp, Artificial Sequence
  source: /note="Description of Artificial Sequence: Synthetic polynucleotide"
gctgcgagccacggacttaaataattgagccttaaagaagaaattctttaagtggatgctctcaaactcagggaaacctaaatctagttatagacaaggcaatcctgagccaagccgaagtagtaattagtaagttaacaacacaaacacaagtaacttagatgtaacacacaccgatcaac

SEQ ID NO: 265 - DNA, 182 bp, Artificial Sequence
  source: /note="Description of Artificial Sequence: Synthetic polynucleotide"
ctgtttaatcacggacttaaataattgagccttaaagaagaaattctttaagtggatgctctcaaactcagggaaacctaaatctagttatagacaaggcaatcctgagccaagccgaagtagtaattagtaagttaacaacacaaacacaagtcatatactgagtataagtataatttcag

SEQ ID NO: 266 - DNA, 192 bp, Artificial Sequence
  source: /note="Description of Artificial Sequence: Synthetic polynucleotide"
cgtaatttatattgtgaatcacggacttaaataattgagccttaaagaagaaattctttaagtggatgctctcaaactcagggaaacctaaatctagttatagacaaggcaatcctgagccaagccgaagtagtaattagtaagttaacaacacaaacacaagtcatatactgagtataagtataatttcag

SEQ ID NO: 267 - DNA, 182 bp, Artificial Sequence
  source: /note="Description of Artificial Sequence: Synthetic polynucleotide"
gctatgatccacggacttaaataattgagccttaaagaagaaattctttaagtggatgctctcaaactcagggaaacctaaatctagttatagacaaggcaatcctgagccaagccgaagtagtaattagtaagttaacaacacaaacacaagtcatatactgagtataagtataatttcag

SEQ ID NO: 268 - DNA, 192 bp, Artificial Sequence
  source: /note="Description of Artificial Sequence: Synthetic polynucleotide"
cggatattatgctgcgatccacggacttaaataattgagccttaaagaagaaattctttaagtggatgctctcaaactcagggaaacctaaatctagttatagacaaggcaatcctgagccaagccgaagtagtaattagtaagttaacaacacaaacacaagtcatatactgagtataagtataatttcag

SEQ ID NO: 269 - DNA, 192 bp, Artificial Sequence
  source: /note="Description of Artificial Sequence: Synthetic polynucleotide"
cggtaggcgcgctgcgagccacggacttaaataattgagccttaaagaagaaattctttaagtggatgctctcaaactcagggaaacctaaatctagttatagacaaggcaatcctgagccaagccgaagtagtaattagtaagttaacaacacaaacacaagtcatatactgagtataagtataatttcag

SEQ ID NO: 270 - DNA, 215 bp, Artificial Sequence
  source: /note="Description of Artificial Sequence: Synthetic polynucleotide"
gcgctaacgtcgacgccggcaaacggtaggcgcgctgcgagccacggacttaaataattgagccttaaagaagaaattctttaagtggatgctctcaaactcagggaaacctaaatctagttatagacaaggcaatcctgagccaagccgaagtagtaattagtaagttaacaacacaaacacaagtcatatactgagtataagtataatttcag

SEQ ID NO: 271 - DNA, 215 bp, Artificial Sequence
  source: /note="Description of Artificial Sequence: Synthetic polynucleotide"
gcatgtcacttgtatcctcgaaacggatattatgctgcgatccacggacttaaataattgagccttaaagaagaaattctttaagtggatgctctcaaactcagggaaacctaaatctagttatagacaaggcaatcctgagccaagccgaagtagtaattagtaagttaacaacacaaacacaagtcatatactgagtataagtataatttcag

SEQ ID NO: 272 - DNA, 215 bp, Artificial Sequence
  source: /note="Description of Artificial Sequence: Synthetic polynucleotide"
gttagagttatcatttatcgaaacgtaatttagattgtgaatcacggacttaaataattgagccttaaagaagaaattctttaagtggatgctctcaaactcagggaaacctaaatctagttatagacaaggcaatcctgagccaagccgaagtagtaattagtaagttaacaacacaaacacaagtcatatactgagtataagtataatttcag

SEQ ID NO: 273 - DNA, 152 bp, Artificial Sequence
  source: /note="Description of Artificial Sequence: Synthetic polynucleotide"
gctgcgagccacggacttaaataattgagccttaaagaagaaattctttaagtggatgctctcaaactcagggaaacctaaatctagttatagacaaggcaatcctgagccaagccgaagtagtaattagtaagttaacaacacaaacacaa

SEQ ID NO: 274 - DNA, 157 bp, Artificial Sequence
  source: /note="Description of Artificial Sequence: Synthetic polynucleotide"
gctgcgagccacggacttaaataattgagccttaaagaagaaattctttaagtggatgctctcaaactcagggaaacctaaatctagttatagacaaggcaatcctgagccaagccgaagtagtaattagtaagttaacaaaacaaaaacaagcccg

SEQ ID NO: 275 - DNA, 182 bp, Artificial Sequence
  source: /note="Description of Artificial Sequence: Synthetic polynucleotide"
gctgcgagccacggacttaaataattgagccttaaagaagaaattctttaagtggatgctctcaaactcagggaaacctaaatctagttatagacaaggcaatcctgagccaagccgaagtagtaattagtaagttaacaaaacaaaaacaagctcgcactggccggaagctcgtcggagcg

SEQ ID NO: 276 - DNA, 251 bp, Artificial Sequence
  source: /note="Description of Artificial Sequence: Synthetic polynucleotide"
gctgcgagccacggacttaaataattgagccttaaagaagaaattctttaagtggatgctctcaaactcagggaaacctaaatctagttatagacaaggcaatcctgagccaagccgaagtagtaattagtaagttaacaatagatgacttacaactaatcggaaggtgcagagactcgacgggagctaccctaacgtcaagacgagggtaaagagagagtccaattctcaaagccaatacacaaacacaa

SEQ ID NO: 277 - DNA, 261 bp, Artificial Sequence
  source: /note="Description of Artificial Sequence: Synthetic polynucleotide"
gctgcgagccacggacttaaataattgagccttaaagaagaaattctttaagtggatgctctcaaactcagggaaacctaaatctagttatagacaaggcaatcctgagccaagccgaagtagtaattagtaagttaacaatagatgacttacaactaatcggaaggtgcagagactcgacgggagctaccctaacgtcaagacgagggtaaagagagagtccaattctcaaagccaatacacaaacacaacttatatact

SEQ ID NO: 278 - DNA, 271 bp, Artificial Sequence
  source: /note="Description of Artificial Sequence: Synthetic polynucleotide"
gctgcgagccacggacttaaataattgagccttaaagaagaaattctttaagtggatgctctcaaactcagggaaacctaaatctagttatagacaaggcaatcctgagccaagccgaagtagtaattagtaagttaacaatagatgacttacaactaatcggaaggtgcagagactcgacgggagctaccctaacgtcaagacgagggtaaagagagagtccaattctcaaagccaatacacaaacacaagagtataagtataatttcag

SEQ ID NO: 279 - DNA, 281 bp, Artificial Sequence
  source: /note="Description of Artificial Sequence: Synthetic polynucleotide"
gctgcgagccacggacttaaataattgagccttaaagaagaaattctttaagtggatgctctcaaactcagggaaacctaaatctagttatagacaaggcaatcctgagccaagccgaagtagtaattagtaagttaacaatagatgacttacaactaatcggaaggtgcagagactcgacgggagctaccctaacgtcaagacgagggtaaagagagagtccaattctcaaagccaatacacaaacacaagtcatatactgagtataagtataatttcag

SEQ ID NO: 280 - DNA, 261 bp, Artificial Sequence
  source: /note="Description of Artificial Sequence: Synthetic polynucleotide"
gctgcgagccacggacttaaataattgagccttaaagaagaaattctttaagtggatgctctcaaactcagggaaacctaaatctagttatagacaaggcaatcctgagccaagccgaagtagtaattagtaagttaacaatagatgacttacaactaatcggaaggtgcagagactcgacgggagctaccctaacgtcaagacgagggtaaagagagagtccaattctcaaagccaataaacaaaaacaagctgacgcta

SEQ ID NO: 281 - DNA, 271 bp, Artificial Sequence
  source: /note="Description of Artificial Sequence: Synthetic polynucleotide"
gctgcgagccacggacttaaataattgagccttaaagaagaaattctttaagtggatgctctcaaactcagggaaacctaaatctagttatagacaaggcaatcctgagccaagccgaagtagtaattagtaagttaacaatagatgacttacaactaatcggaaggtgcagagactcgacgggagctaccctaacgtcaagacgagggtaaagagagagtccaattctcaaagccaataaacaaaaacaagctgacgctagtatgagtat

SEQ ID NO: 282 - DNA, 281 bp, Artificial Sequence
  source: /note="Description of Artificial Sequence: Synthetic polynucleotide"
gctgcgagccacggacttaaataattgagccttaaagaagaaattctttaagtggatgctctcaaactcagggaaacctaaatctagttatagacaaggcaatcctgagccaagccgaagtagtaattagtaagttaacaatagatgacttacaactaatcggaaggtgcagagactcgacgggagctaccctaacgtcaagacgagggtaaagagagagtccaattctcaaagccaataaacaaaaacaagctgacgctagtatgagtatagcttcacac

SEQ ID NO: 283 - DNA, 261 bp, Artificial Sequence
  source: /note="Description of Artificial Sequence: Synthetic polynucleotide"
gctgcgagccacggacttaaataattgagccttaaagaagaaattctttaagtggatgctctcaaactcagggaaacctaaatctagttatagacaaggcaatcctgagccaagccgaagtagtaattagtaagttaacaatagatgacttacaactaatcggaaggtgcagagactcgacgggagctaccctaacgtcaagacgagggtaaagagagagtccaattctcaaagccaataaacaaaaacaagctcgcaccg

SEQ ID NO: 284 - DNA, 271 bp, Artificial Sequence
  source: /note="Description of Artificial Sequence: Synthetic polynucleotide"
gctgcgagccacggacttaaataattgagccttaaagaagaaattctttaagtggatgctctcaaactcagggaaacctaaatctagttatagacaaggcaatcctgagccaagccgaagtagtaattagtaagttaacaatagatgacttacaactaatcggaaggtgcagagactcgacgggagctaccctaacgtcaagacgagggtaaagagagagtccaattctcaaagccaataaacaaaaacaagctcgcactgggtcggagcg

SEQ ID NO: 285 - DNA, 281 bp, Artificial Sequence
  source: /note="Description of Artificial Sequence: Synthetic polynucleotide"
gctgcgagccacggacttaaataattgagccttaaagaagaaattctttaagtggatgctctcaaactcagggaaacctaaatctagttatagacaaggcaatcctgagccaagccgaagtagtaattagtaagttaacaatagatgacttacaactaatcggaaggtgcagagactcgacgggagctaccctaacgtcaagacgagggtaaagagagagtccaattctcaaagccaataaacaaaaacaagctcgcactggccggaagctcgtcggagcg

SEQ ID NO: 286 - DNA, 210 bp, Artificial Sequence
  source: /note="Description of Artificial Sequence: Synthetic polynucleotide"
gctgcgagccacggacttaaataattgagccttaaagaagaaattctttaagtggatgctctcaaactcagggaaacctaaatctagttatagacaaggcaatcctgagccaagccgaagtagtaattagtaagttaacaatagatgacttacaactaatcggaaggtgcagagactcgacgggagctaccctaacgtccacaaacacaa

SEQ ID NO: 287 - DNA, 220 bp, Artificial Sequence
  source: /note="Description of Artificial Sequence: Synthetic polynucleotide"
gctgcgagccacggacttaaataattgagccttaaagaagaaattctttaagtggatgctctcaaactcagggaaacctaaatctagttatagacaaggcaatcctgagccaagccgaagtagtaattagtaagttaacaatagatgacttacaactaatcggaaggtgcagagactcgacgggagctaccctaacgtccacaaacacaacttatatact

SEQ ID NO: 288 - DNA, 230 bp, Artificial Sequence
  source: /note="Description of Artificial Sequence: Synthetic polynucleotide"
gctgcgagccacggacttaaataattgagccttaaagaagaaattctttaagtggatgctctcaaactcagggaaacctaaatctagttatagacaaggcaatcctgagccaagccgaagtagtaattagtaagttaacaatagatgacttacaactaatcggaaggtgcagagactcgacgggagctaccctaacgtccacaaacacaagagtataagtataatttcag

SEQ ID NO: 289 - DNA, 240 bp, Artificial Sequence
  source: /note="Description of Artificial Sequence: Synthetic polynucleotide"
gctgcgagccacggacttaaataattgagccttaaagaagaaattctttaagtggatgctctcaaactcagggaaacctaaatctagttatagacaaggcaatcctgagccaagccgaagtagtaattagtaagttaacaatagatgacttacaactaatcggaaggtgcagagactcgacgggagctaccctaacgtccacaaacacaagtcatatactgagtataagtataatttcag

SEQ ID NO: 290 - DNA, 220 bp, Artificial Sequence
  source: /note="Description of Artificial Sequence: Synthetic polynucleotide"
gctgcgagccacggacttaaataattgagccttaaagaagaaattctttaagtggatgctctcaaactcagggaaacctaaatctagttatagacaaggcaatcctgagccaagccgaagtagtaattagtaagttaacaatagatgacttacaactaatcggaaggtgcagagactcgacgggagctaccctaacgtcaacaaaaacaagctgacgcta

SEQ ID NO: 291 - DNA, 230 bp, Artificial Sequence
  source: /note="Description of Artificial Sequence: Synthetic polynucleotide"
gctgcgagccacggacttaaataattgagccttaaagaagaaattctttaagtggatgctctcaaactcagggaaacctaaatctagttatagacaaggcaatcctgagccaagccgaagtagtaattagtaagttaacaatagatgacttacaactaatcggaaggtgcagagactcgacgggagctaccctaacgtcaacaaaaacaagctgacgctagtatgagtat

SEQ ID NO: 292 - DNA, 240 bp, Artificial Sequence
  source: /note="Description of Artificial Sequence: Synthetic polynucleotide"
gctgcgagccacggacttaaataattgagccttaaagaagaaattctttaagtggatgctctcaaactcagggaaacctaaatctagttatagacaaggcaatcctgagccaagccgaagtagtaattagtaagttaacaatagatgacttacaactaatcggaaggtgcagagactcgacgggagctaccctaacgtcaacaaaaacaagctgacgctagtatgagtatagcttcacac

SEQ ID NO: 293 - DNA, 220 bp, Artificial Sequence
  source: /note="Description of Artificial Sequence: Synthetic polynucleotide"
gctgcgagccacggacttaaataattgagccttaaagaagaaattctttaagtggatgctctcaaactcagggaaacctaaatctagttatagacaaggcaatcctgagccaagccgaagtagtaattagtaagttaacaatagatgacttacaactaatcggaaggtgcagagactcgacgggagctaccctaacgtcaacaaaaacaagctcgcaccg

SEQ ID NO: 294 - DNA, 230 bp, Artificial Sequence
  source: /note="Description of Artificial Sequence: Synthetic polynucleotide"
gctgcgagccacggacttaaataattgagccttaaagaagaaattctttaagtggatgctctcaaactcagggaaacctaaatctagttatagacaaggcaatcctgagccaagccgaagtagtaattagtaagttaacaatagatgacttacaactaatcggaaggtgcagagactcgacgggagctaccctaacgtcaacaaaaacaagctcgcactgggtcggagcg

SEQ ID NO: 295 - DNA, 240 bp, Artificial Sequence
  source: /note="Description of Artificial Sequence: Synthetic polynucleotide"
gctgcgagccacggacttaaataattgagccttaaagaagaaattctttaagtggatgctctcaaactcagggaaacctaaatctagttatagacaaggcaatcctgagccaagccgaagtagtaattagtaagttaacaatagatgacttacaactaatcggaaggtgcagagactcgacgggagctaccctaacgtcaacaaaaacaagctcgcactggccggaagctcgtcggagcg

SEQ ID NO: 296 - DNA, 172 bp, Artificial Sequence
  source: /note="Description of Artificial Sequence: Synthetic polynucleotide"
acggacttaaataattgagccttaaagaagaaattctttaagtggatgctctcaaactcagggaaacctaaatctagttatagacaaggcaatcctgagccaagccgaagtagtaattagtaagttaacaacacaaacacaagtcatatactgagtataagtataatttcag

SEQ ID NO: 297 - DNA, 271 bp, Artificial Sequence
  source: /note="Description of Artificial Sequence: Synthetic polynucleotide"
acggacttaaataattgagccttaaagaagaaattctttaagtggatgctctcaaactcagggaaacctaaatctagttatagacaaggcaatcctgagccaagccgaagtagtaattagtaagttaacaatagatgacttacaactaatcggaaggtgcagagactcgacgggagctaccctaacgtcaagacgagggtaaagagagagtccaattctcaaagccaatacacaaacacaagtcatatactgagtataagtataatttcag

SEQ ID NO: 298 - DNA, 281 bp, Artificial Sequence
  source: /note="Description of Artificial Sequence: Synthetic polynucleotide"
ctgtttaatcacggacttaaataattgagccttaaagaagaaattctttaagtggatgctctcaaactcagggaaacctaaatctagttatagacaaggcaatcctgagccaagccgaagtagtaattagtaagttaacaatagatgacttacaactaatcggaaggtgcagagactcgacgggagctaccctaacgtcaagacgagggtaaagagagagtccaattctcaaagccaatacacaaacacaagtcatatactgagtataagtataatttcag

SEQ ID NO: 299 - DNA, 291 bp, Artificial Sequence
  source: /note="Description of Artificial Sequence: Synthetic polynucleotide"
cgtaatttatattgtgaatcacggacttaaataattgagccttaaagaagaaattctttaagtggatgctctcaaactcagggaaacctaaatctagttatagacaaggcaatcctgagccaagccgaagtagtaattagtaagttaacaatagatgacttacaactaatcggaaggtgcagagactcgacgggagctaccctaacgtcaagacgagggtaaagagagagtccaattctcaaagccaatacacaaacacaagtcatatactgagtataagtataatttcag

SEQ ID NO: 300 - DNA, 281 bp, Artificial Sequence
  source: /note="Description of Artificial Sequence: Synthetic polynucleotide"
gctatgatccacggacttaaataattgagccttaaagaagaaattctttaagtggatgctctcaaactcagggaaacctaaatctagttatagacaaggcaatcctgagccaagccgaagtagtaattagtaagttaacaatagatgacttacaactaatcggaaggtgcagagactcgacgggagctaccctaacgtcaagacgagggtaaagagagagtccaattctcaaagccaatacacaaacacaagtcatatactgagtataagtataatttcag

SEQ ID NO: 301 - DNA, 291 bp, Artificial Sequence
  source: /note="Description of Artificial Sequence: Synthetic polynucleotide"
cggatattatgctgcgatccacggacttaaataattgagccttaaagaagaaattctttaagtggatgctctcaaactcagggaaacctaaatctagttatagacaaggcaatcctgagccaagccgaagtagtaattagtaagttaacaatagatgacttacaactaatcggaaggtgcagagactcgacgggagctaccctaacgtcaagacgagggtaaagagagagtccaattctcaaagccaatacacaaacacaagtcatatactgagtataagtataatttcag

SEQ ID NO: 302 - DNA, 291 bp, Artificial Sequence
  source: /note="Description of Artificial Sequence: Synthetic polynucleotide"
cggtaggcgcgctgcgagccacggacttaaataattgagccttaaagaagaaattctttaagtggatgctctcaaactcagggaaacctaaatctagttatagacaaggcaatcctgagccaagccgaagtagtaattagtaagttaacaatagatgacttacaactaatcggaaggtgcagagactcgacgggagctaccctaacgtcaagacgagggtaaagagagagtccaattctcaaagccaatacacaaacacaagtcatatactgagtataagtataatttcag

SEQ ID NO: 303 - DNA, 230 bp, Artificial Sequence
  source: /note="Description of Artificial Sequence: Synthetic polynucleotide"
acggacttaaataattgagccttaaagaagaaattctttaagtggatgctctcaaactcagggaaacctaaatctagttatagacaaggcaatcctgagccaagccgaagtagtaattagtaagttaacaatagatgacttacaactaatcggaaggtgcagagactcgacgggagctaccctaacgtccacaaacacaagtcatatactgagtataagtataatttcag

SEQ ID NO: 304 - DNA, 240 bp, Artificial Sequence
  source: /note="Description of Artificial Sequence: Synthetic polynucleotide"
ctgtttaatcacggacttaaataattgagccttaaagaagaaattctttaagtggatgctctcaaactcagggaaacctaaatctagttatagacaaggcaatcctgagccaagccgaagtagtaattagtaagttaacaatagatgacttacaactaatcggaaggtgcagagactcgacgggagctaccctaacgtccacaaacacaagtcatatactgagtataagtataatttcag

SEQ ID NO: 305 - DNA, 250 bp, Artificial Sequence
  source: /note="Description of Artificial Sequence: Synthetic polynucleotide"
cgtaatttatattgtgaatcacggacttaaataattgagccttaaagaagaaattctttaagtggatgctctcaaactcagggaaacctaaatctagttatagacaaggcaatcctgagccaagccgaagtagtaattagtaagttaacaatagatgacttacaactaatcggaaggtgcagagactcgacgggagctaccctaacgtccacaaacacaagtcatatactgagtataagtataatttcag

SEQ ID NO: 306 - DNA, 240 bp, Artificial Sequence
  source: /note="Description of Artificial Sequence: Synthetic polynucleotide"
gctatgatccacggacttaaataattgagccttaaagaagaaattctttaagtggatgctctcaaactcagggaaacctaaatctagttatagacaaggcaatcctgagccaagccgaagtagtaattagtaagttaacaatagatgacttacaactaatcggaaggtgcagagactcgacgggagctaccctaacgtccacaaacacaagtcatatactgagtataagtataatttcag

SEQ ID NO: 307 - DNA, 250 bp, Artificial Sequence
  source: /note="Description of Artificial Sequence: Synthetic polynucleotide"
cggatattatgctgcgatccacggacttaaataattgagccttaaagaagaaattctttaagtggatgctctcaaactcagggaaacctaaatctagttatagacaaggcaatcctgagccaagccgaagtagtaattagtaagttaacaatagatgacttacaactaatcggaaggtgcagagactcgacgggagctaccctaacgtccacaaacacaagtcatatactgagtataagtataatttcag

SEQ ID NO: 308 - DNA, 250 bp, Artificial Sequence
  source: /note="Description of Artificial Sequence: Synthetic polynucleotide"
cggtaggcgcgctgcgagccacggacttaaataattgagccttaaagaagaaattctttaagtggatgctctcaaactcagggaaacctaaatctagttatagacaaggcaatcctgagccaagccgaagtagtaattagtaagttaacaatagatgacttacaactaatcggaaggtgcagagactcgacgggagctaccctaacgtccacaaacacaagtcatatactgagtataagtataatttcag

SEQ ID NO: 309 - DNA, 1137 bp, Artificial Sequence
  source: /note="Description of Artificial Sequence: Synthetic polynucleotide"
atgctgctgctggtcacatctctgctgctgtgcgagctgccccatcctgcctttctgctgatccccgacatccagatgacccagaccacaagcagcctgtctgccagcctgggcgatagagtgaccatcagctgtagagccagccaggacatcagcaagtacctgaactggtatcagcaaaagcccgacggcaccgtgaagctgctgatctaccacaccagcagactgcacagcggcgtgccaagcagattttctggcagcggctctggcaccgactacagcctgacaatcagcaacctggaacaagaggatatcgctacctacttctgccagcaaggcaacaccctgccttacacctttggcggaggcaccaagctggaaatcaccggctctacaagcggcagcggcaaacctggatctggcgagggatctaccaagggcgaagtgaaactgcaagagtctggccctggactggtggccccatctcagtctctgagcgtgacctgtacagtcagcggagtgtccctgcctgattacggcgtgtcctggatcagacagcctcctcggaaaggcctggaatggctgggagtgatctggggcagcgagacaacctactacaacagcgccctgaagtcccggctgaccatcatcaaggacaactccaagagccaggtgttcctgaagatgaacagcctgcagaccgacgacaccgccatctactattgcgccaagcactactactacggcggcagctacgccatggattattggggccagggcaccagcgtgaccgtttcttctgccgccgctatcgaagtgatgtaccctcctccttacctggacaacgagaagtccaacggcaccatcatccacgtgaagggcaagcacctgtgtccttctccactgttccccggacctagcaagcctttctgggtgctcgttgttgttggcggcgtgctggcctgttacagcctgctggttaccgtggccttcatcatcttttgggtcaagagaggccggaagaaacttctttatatattcaagcagccctttatgcgacccgttcagactacccaagaggaagatggatgcagttgccgctttccagaagaggaggagggcgggtgcgaactgtaa

SEQ ID NO: 310 - DNA, 1134 bp, Artificial Sequence
  source: /note="Description of Artificial Sequence: Synthetic polynucleotide"
atgctgctgctggtcacatctctgctgctgtgcgagctgccccatcctgcctttctgctgatccccgacatccagatgacccagaccacaagcagcctgtctgccagcctgggcgatagagtgaccatcagctgtagagccagccaggacatcagcaagtacctgaactggtatcagcaaaagcccgacggcaccgtgaagctgctgatctaccacaccagcagactgcacagcggcgtgccaagcagattttctggcagcggctctggcaccgactacagcctgacaatcagcaacctggaacaagaggatatcgctacctacttctgccagcaaggcaacaccctgccttacacctttggcggaggcaccaagctggaaatcaccggctctacaagcggcagcggcaaacctggatctggcgagggatctaccaagggcgaagtgaaactgcaagagtctggccctggactggtggccccatctcagtctctgagcgtgacctgtacagtcagcggagtgtccctgcctgattacggcgtgtcctggatcagacagcctcctcggaaaggcctggaatggctgggagtgatctggggcagcgagacaacctactacaacagcgccctgaagtcccggctgaccatcatcaaggacaactccaagagccaggtgttcctgaagatgaacagcctgcagaccgacgacaccgccatctactattgcgccaagcactactactacggcggcagctacgccatggattattggggccagggcaccagcgtgaccgtttcttctgccgccgctatcgaagtgatgtaccctcctccttacctggacaacgagaagtccaacggcaccatcatccacgtgaagggcaagcacctgtgtccttctccactgttccccggacctagcaagcctttctgggtgctcgttgttgttggcggcgtgctggcctgttacagcctgctggttaccgtggccttcatcatcttttgggtccgaagcaagcggagccggctgctgcactccgactacatgaacatgacccctagacggcccggaccaaccagaaagcactaccagccttacgctcctcctagagacttcgccgcctaccggtcctaa

SEQ ID NO: 311 - DNA, 1470 bp, Artificial Sequence
  source: /note="Description of Artificial Sequence: Synthetic polynucleotide"
atgctgctgctggtcacatctctgctgctgtgcgagctgccccatcctgcctttctgctgatccccgacatccagatgacccagaccacaagcagcctgtctgccagcctgggcgatagagtgaccatcagctgtagagccagccaggacatcagcaagtacctgaactggtatcagcaaaagcccgacggcaccgtgaagctgctgatctaccacaccagcagactgcacagcggcgtgccaagcagattttctggcagcggctctggcaccgactacagcctgacaatcagcaacctggaacaagaggatatcgctacctacttctgccagcaaggcaacaccctgccttacacctttggcggaggcaccaagctggaaatcaccggctctacaagcggcagcggcaaacctggatctggcgagggatctaccaagggcgaagtgaaactgcaagagtctggccctggactggtggccccatctcagtctctgagcgtgacctgtacagtcagcggagtgtccctgcctgattacggcgtgtcctggatcagacagcctcctcggaaaggcctggaatggctgggagtgatctggggcagcgagacaacctactacaacagcgccctgaagtcccggctgaccatcatcaaggacaactccaagagccaggtgttcctgaagatgaacagcctgcagaccgacgacaccgccatctactattgcgccaagcactactactacggcggcagctacgccatggattattggggccagggcaccagcgtgaccgtttcttctgccgccgctatcgaagtgatgtaccctcctccttacctggacaacgagaagtccaacggcaccatcatccacgtgaagggcaagcacctgtgtccttctccactgttccccggacctagcaagcctttctgggtgctcgttgttgttggcggcgtgctggcctgttacagcctgctggttaccgtggccttcatcatcttttgggtccgaagcaagcggagccggctgctgcactccgactacatgaacatgacccctagacggcccggaccaaccagaaagcactaccagccttacgctcctcctagagacttcgccgcctaccggtccagagtgaagttcagcagatccgccgatgctcccgcctatcagcagggccaaaaccagctgtacaacgagctgaacctggggagaagagaagagtacgacgtgctggacaagcggagaggcagagatcctgaaatgggcggcaagcccagacggaagaatcctcaagagggcctgtataatgagctgcagaaagacaagatggccgaggcctacagcgagatcggaatgaagggcgagcgcagaagaggcaagggacacgatggactgtaccagggactgagcaccgccaccaaggatacctatgacgccctgcacatgcaggccctgcctccaagataa

SEQ ID NO: 312 - DNA, 1347 bp, Artificial Sequence
  source: /note="Description of Artificial Sequence: Synthetic polynucleotide"
atgctgctgctggtcacatctctgctgctgtgcgagctgccccatcctgcctttctgctgatccccgacatccagatgacccagaccacaagcagcctgtctgccagcctgggcgatagagtgaccatcagctgtagagccagccaggacatcagcaagtacctgaactggtatcagcaaaagcccgacggcaccgtgaagctgctgatctaccacaccagcagactgcacagcggcgtgccaagcagattttctggcagcggctctggcaccgactacagcctgacaatcagcaacctggaacaagaggatatcgctacctacttctgccagcaaggcaacaccctgccttacacctttggcggaggcaccaagctggaaatcaccggctctacaagcggcagcggcaaacctggatctggcgagggatctaccaagggcgaagtgaaactgcaagagtctggccctggactggtggccccatctcagtctctgagcgtgacctgtacagtcagcggagtgtccctgcctgattacggcgtgtcctggatcagacagcctcctcggaaaggcctggaatggctgggagtgatctggggcagcgagacaacctactacaacagcgccctgaagtcccggctgaccatcatcaaggacaactccaagagccaggtgttcctgaagatgaacagcctgcagaccgacgacaccgccatctactattgcgccaagcactactactacggcggcagctacgccatggattattggggccagggcaccagcgtgaccgtttcttctgccgccgctatcgaagtgatgtaccctcctccttacctggacaacgagaagtccaacggcaccatcatccacgtgaagggcaagcacctgtgtccttctccactgttccccggacctagcaagcctttctgggtgctcgttgttgttggcggcgtgctggcctgttacagcctgctggttaccgtggccttcatcatcttttgggtcagagtgaagttcagcagatccgccgatgctcccgcctatcagcagggccaaaaccagctgtacaacgagctgaacctggggagaagagaagagtacgacgtgctggacaagcggagaggcagagatcctgaaatgggcggcaagcccagacggaagaatcctcaagagggcctgtataatgagctgcagaaagacaagatggccgaggcctacagcgagatcggaatgaagggcgagcgcagaagaggcaagggacacgatggactgtaccagggactgagcaccgccaccaaggatacctatgacgccctgcacatgcaggccctgcctccaagataa

SEQ ID NO: 313 - DNA, 1461 bp, Artificial Sequence
  source: /note="Description of Artificial Sequence: Synthetic polynucleotide"
atggctctcccggtcacagcccttctcctgcccctggcactcttgctgcatgcggcacgacccgacatccagatgacccagaccacaagcagcctgtctgccagcctgggcgatagagtgaccatcagctgtagagccagccaggacatcagcaagtacctgaactggtatcagcaaaagcccgacggcaccgtgaagctgctgatctaccacaccagcagactgcacagcggcgtgccaagcagattttctggcagcggctctggcaccgactacagcctgacaatcagcaacctggaacaagaggatatcgctacctacttctgccagcaaggcaacaccctgccttacacctttggcggaggcaccaagctggaaatcaccggtggaggtggttctggcggagggggatctggtggaggcggttcagaagtgaaactgcaagagtctggccctggactggtggccccatctcagtctctgagcgtgacctgtacagtcagcggagtgtccctgcctgattacggcgtgtcctggatcagacagcctcctcggaaaggcctggaatggctgggagtgatctggggcagcgagacaacctactacaacagcgccctgaagtcccggctgaccatcatcaaggacaactccaagagccaggtgttcctgaagatgaacagcctgcagaccgacgacaccgccatctactattgcgccaagcactactactacggcggcagctacgccatggattattggggccagggcaccagcgtgaccgtttcttctaccacaacgcccgccccgcgaccgcctactcccgctcccacaattgcatcacaacccctgtctttgagacccgaagcttgtcgaccagctgccggtggcgcggttcacacgcgggggctcgatttcgcctgtgatatatatatatgggccccattggctggaacatgcggagtattgcttctgagcctggtgattaccctctactgtaagagaggccggaagaaacttctttatatattcaagcagccctttatgcgacccgttcagactacccaagaggaagatggatgcagttgccgctttccagaagaggaggagggcgggtgcgaactgagagtgaagttcagcagatccgccgatgctcccgcctatcagcagggccaaaaccagctgtacaacgagctgaacctggggagaagagaagagtacgacgtgctggacaagcggagaggcagagatcctgaaatgggcggcaagcccagacggaagaatcctcaagagggcctgtataatgagctgcagaaagacaagatggccgaggcctacagcgagatcggaatgaagggcgagcgcagaagaggcaagggacacgatggactgtaccagggactgagcaccgccaccaaggatacctatgacgccctgcacatgcaggccctgcctccaagataa

SEQ ID NO: 314 - DNA, 1461 bp, Artificial Sequence
  source: /note="Description of Artificial Sequence: Synthetic polynucleotide"
atggctctcccggtcacagcccttctcctgcccctggcactcttgctgcatgcggcacgacccgacatccagatgacccagaccacaagcagcctgtctgccagcctgggcgatagagtgaccatcagctgtagagccagccaggacatcagcaagtacctgaactggtatcagcaaaagcccgacggcaccgtgaagctgctgatctaccacaccagcagactgcacagcggcgtgccaagcagattttctggcagcggctctggcaccgactacagcctgacaatcagcaacctggaacaagaggatatcgctacctacttctgccagcaaggcaacaccctgccttacacctttggcggaggcaccaagctggaaatcaccggtggaggtggttctggcggagggggatctggtggaggcggttcagaagtgaaactgcaagagtctggccctggactggtggccccatctcagtctctgagcgtgacctgtacagtcagcggagtgtccctgcctgattacggcgtgtcctggatcagacagcctcctcggaaaggcctggaatggctgggagtgatctggggcagcgagacaacctactacaacagcgccctgaagtcccggctgaccatcatcaaggacaactccaagagccaggtgttcctgaagatgaacagcctgcagaccgacgacaccgccatctactattgcgccaagcactactactacggcggcagctacgccatggattattggggccagggcaccagcgtgaccgtttcttctaccacaacgcccgccccgcgaccgcctactcccgctcccacaattgcatcacaacccctgtctttgagacccgaagcttgtcgaccagctgccggtggcgcggttcacacgcgggggctcgatttcgcctgtgatatatatatatgggccccattggctggaacatgcggagtattgcttctgagcctggtgattaccctctactgtaagagaggccggaagaaacttctttatatattcaagcagccctttatgcgacccgttcagactacccaagaggaagatggatgcagttgccgctttccagaagaggaggagggcgggtgcgaactgagagtgaagttcagcagatccgccgatgctcccgcctataagcagggccaaaaccagctgtacaacgagctgaacctggggagaagagaagagtacgacgtgctggacaagcggagaggcagagatcctgaaatgggcggcaagcccagacggaagaatcctcaagagggcctgtataatgagctgcagaaagacaagatggccgaggcctacagcgagatcggaatgaagggcgagcgcagaagaggcaagggacacgatggactgtaccagggactgagcaccgccaccaaggatacctatgacgccctgcacatgcaggccctgcctccaagataa

SEQ ID NO: 315 - DNA, 1452 bp, Artificial Sequence
  source: /note="Description of Artificial Sequence: Synthetic polynucleotide"
atgctgctgctggtcacatctctgctgctgtgcgagctgccccatcctgcctttctgctgatcccccaggttcaactccagcagtctggtcccggcctcgttaaaccaagccagactttgtctcttacctgtgctatcagtggcgatagcgtgtctagtaattcagccgcatggaactggatccgacaatcaccgagtaggggacttgaatggctgggtagaacctattaccggtccaaatggtacaatgactatgcagtgtctgtaaaaagcaggatcacgatcaaccctgatacgtctaaaaaccagttttctctgcaacttaatagtgtgacccctgaagacaccgctgtgtattactgtgcacgggaggttaccggtgatcttgaagatgcttttgatatatggggccaaggtacgatggtcacggtgtctagtgggggaggcggcagcgacatacagatgacgcagagcccatccagtctctccgcgtctgttggtgacagagtgactattacatgtagggcgtctcagaccatttggtcttacctcaattggtatcaacagcgaccaggcaaagcaccgaacttgctcatttacgctgccagctcactccaaagtggtgtgccgtccagatttagtggtaggggcagtggcactgatttcactctgactatttcaagtcttcaagctgaggattttgccacatactactgccagcaaagttactcaatacctcagacttttggacaggggacaaaattggagattaaatccggaaccacaacgcccgccccgcgaccgcctactcccgctcccacaattgcatcacaacccctgtctttgagacccgaagcttgtcgaccagctgccggtggcgcggttcacacgcgggggctcgatttcgcctgtgatatatatatatgggccccattggctggaacatgcggagtattgcttctgagcctggtgattaccctctactgtaagagaggccggaagaaacttctttatatattcaagcagccctttatgcgacccgttcagactacccaagaggaagatggatgcagttgccgctttccagaagaggaggagggcgggtgcgaactgagagtgaagttcagcagatccgccgatgctcccgcctataagcagggccaaaaccagctgtacaacgagctgaacctggggagaagagaagagtacgacgtgctggacaagcggagaggcagagatcctgaaatgggcggcaagcccagacggaagaatcctcaagagggcctgtataatgagctgcagaaagacaagatggccgaggcctacagcgagatcggaatgaagggcgagcgcagaagaggcaagggacacgatggactgtaccagggactgagcaccgccaccaaggatacctatgacgccctgcacatgcaggccctgcctccaagataa

SEQ ID NO: 316 - DNA, 2202 bp, Artificial Sequence
  source: /note="Description of Artificial Sequence: Synthetic polynucleotide"
atgctgctgctggtcacatctctgctgctgtgcgagctgccccatcctgcctttctgctgatccccgacatccagatgacccagaccacaagcagcctgtctgccagcctgggcgatagagtgaccatcagctgtagagccagccaggacatcagcaagtacctgaactggtatcagcaaaagcccgacggcaccgtgaagctgctgatctaccacaccagcagactgcacagcggcgtgccaagcagattttctggcagcggctctggcaccgactacagcctgacaatcagcaacctggaacaagaggatatcgctacctacttctgccagcaaggcaacaccctgccttacacctttggcggaggcaccaagctggaaatcaccggcggcggaggatcccaggttcaactccagcagtctggtcccggcctcgttaaaccaagccagactttgtctcttacctgtgctatcagtggcgatagcgtgtctagtaattcagccgcatggaactggatccgacaatcaccgagtaggggacttgaatggctgggtagaacctattaccggtccaaatggtacaatgactatgcagtgtctgtaaaaagcaggatcacgatcaaccctgatacgtctaaaaaccagttttctctgcaacttaatagtgtgacccctgaagacaccgctgtgtattactgtgcacgggaggttaccggtgatcttgaagatgcttttgatatatggggccaaggtacgatggtcacggtgtctagtggctctacaagcggcagcggcaaacctggatctggcgagggatctaccaagggcgacatacagatgacgcagagcccatccagtctctccgcgtctgttggtgacagagtgactattacatgtagggcgtctcagaccatttggtcttacctcaattggtatcaacagcgaccaggcaaagcaccgaacttgctcatttacgctgccagctcactccaaagtggtgtgccgtccagatttagtggtaggggcagtggcactgatttcactctgactatttcaagtcttcaagctgaggattttgccacatactactgccagcaaagttactcaatacctcagacttttggacaggggacaaaattggagattaaagggggaggcggcagcgaagtgaaactgcaagagtctggccctggactggtggccccatctcagtctctgagcgtgacctgtacagtcagcggagtgtccctgcctgattacggcgtgtcctggatcagacagcctcctcggaaaggcctggaatggctgggagtgatctggggcagcgagacaacctactacaacagcgccctgaagtcccggctgaccatcatcaaggacaactccaagagccaggtgttcctgaagatgaacagcctgcagaccgacgacaccgccatctactattgcgccaagcactactactacggcggcagctacgccatggattattggggccagggcaccagcgtgaccgtttcttcttccggaaccacaacgcccgccccgcgaccgcctactcccgctcccacaattgcatcacaacccctgtctttgagacccgaagcttgtcgaccagctgccggtggcgcggttcacacgcgggggctcgatttcgcctgtgatatatatatatgggccccattggctggaacatgcggagtattgcttctgagcctggtgattaccctctactgtaagagaggccggaagaaacttctttatatattcaagcagccctttatgcgacccgttcagactacccaagaggaagatggatgcagttgccgctttccagaagaggaggagggcgggtgcgaactgagagtgaagttcagcagatccgccgatgctcccgcctataagcagggccaaaaccagctgtacaacgagctgaacctggggagaagagaagagtacgacgtgctggacaagcggagaggcagagatcctgaaatgggcggcaagcccagacggaagaatcctcaagagggcctgtataatgagctgcagaaagacaagatggccgaggcctacagcgagatcggaatgaagggcgagcgcagaagaggcaagggacacgatggactgtaccagggactgagcaccgccaccaaggatacctatgacgccctgcacatgcaggccctgcctccaagataa

SEQ ID NO: 317 - DNA, 2262 bp, Artificial Sequence
  source: /note="Description of Artificial Sequence: Synthetic polynucleotide"
atgctgctgctggtcacatctctgctgctgtgcgagctgccccatcctgcctttctgctgatcccccaggttcaactccagcagtctggtcccggcctcgttaaaccaagccagactttgtctcttacctgtgctatcagtggcgatagcgtgtctagtaattcagccgcatggaactggatccgacaatcaccgagtaggggacttgaatggctgggtagaacctattaccggtccaaatggtacaatgactatgcagtgtctgtaaaaagcaggatcacgatcaaccctgatacgtctaaaaaccagttttctctgcaacttaatagtgtgacccctgaagacaccgctgtgtattactgtgcacgggaggttaccggtgatcttgaagatgcttttgatatatggggccaaggtacgatggtcacggtgtctagtgggggaggcggcagcgacatacagatgacgcagagcccatccagtctctccgcgtctgttggtgacagagtgactattacatgtagggcgtctcagaccatttggtcttacctcaattggtatcaacagcgaccaggcaaagcaccgaacttgctcatttacgctgccagctcactccaaagtggtgtgccgtccagatttagtggtaggggcagtggcactgatttcactctgactatttcaagtcttcaagctgaggattttgccacatactactgccagcaaagttactcaatacctcagacttttggacaggggacaaaattggagattaaagggggaggcggatccggcggtggtggctccggcggtggtggttctggaggcggcggaagcggtgggggtggtagcgacatccagatgacccagaccacaagcagcctgtctgccagcctgggcgatagagtgaccatcagctgtagagccagccaggacatcagcaagtacctgaactggtatcagcaaaagcccgacggcaccgtgaagctgctgatctaccacaccagcagactgcacagcggcgtgccaagcagattttctggcagcggctctggcaccgactacagcctgacaatcagcaacctggaacaagaggatatcgctacctacttctgccagcaaggcaacaccctgccttacacctttggcggaggcaccaagctggaaatcaccggctctacaagcggcagcggcaaacctggatctggcgagggatctaccaagggcgaagtgaaactgcaagagtctggccctggactggtggccccatctcagtctctgagcgtgacctgtacagtcagcggagtgtccctgcctgattacggcgtgtcctggatcagacagcctcctcggaaaggcctggaatggctgggagtgatctggggcagcgagacaacctactacaacagcgccctgaagtcccggctgaccatcatcaaggacaactccaagagccaggtgttcctgaagatgaacagcctgcagaccgacgacaccgccatctactattgcgccaagcactactactacggcggcagctacgccatggattattggggccagggcaccagcgtgaccgtttcttcttccggaaccacaacgcccgccccgcgaccgcctactcccgctcccacaattgcatcacaacccctgtctttgagacccgaagcttgtcgaccagctgccggtggcgcggttcacacgcgggggctcgatttcgcctgtgatatatatatatgggccccattggctggaacatgcggagtattgcttctgagcctggtgattaccctctactgtaagagaggccggaagaaacttctttatatattcaagcagccctttatgcgacccgttcagactacccaagaggaagatggatgcagttgccgctttccagaagaggaggagggcgggtgcgaactgagagtgaagttcagcagatccgccgatgctcccgcctataagcagggccaaaaccagctgtacaacgagctgaacctggggagaagagaagagtacgacgtgctggacaagcggagaggcagagatcctgaaatgggcggcaagcccagacggaagaatcctcaagagggcctgtataatgagctgcagaaagacaagatggccgaggcctacagcgagatcggaatgaagggcgagcgcagaagaggcaagggacacgatggactgtaccagggactgagcaccgccaccaaggatacctatgacgccctgcacatgcaggccctgcctccaagataa

SEQ ID NO: 318 - protein, 489 aa, Artificial Sequence
  source: /note="Description of Artificial Sequence: Synthetic polypeptide"
MLLLVTSLLLCELPHPAFLLIPDIQMTQTTSSLSASLGDRVTISCRASQDISKYLNWYQQKPDGTVKLLIYHTSRLHSGVPSRFSGSGSGTDYSLTISNLEQEDIATYFCQQGNTLPYTFGGGTKLEITGSTSGSGKPGSGEGSTKGEVKLQESGPGLVAPSQSLSVTCTVSGVSLPDYGVSWIRQPPRKGLEWLGVIWGSETTYYNSALKSRLTIIKDNSKSQVFLKMNSLQTDDTAIYYCAKHYYYGGSYAMDYWGQGTSVTVSSAAAIEVMYPPPYLDNEKSNGTIIHVKGKHLCPSPLFPGPSKPFWVLVVVGGVLACYSLLVTVAFIIFWVRSKRSRLLHSDYMNMTPRRPGPTRKHYQPYAPPRDFAAYRSRVKFSRSADAPAYQQGQNQLYNELNLGRREEYDVLDKRRGRDPEMGGKPRRKNPQEGLYNELQKDKMAEAYSEIGMKGERRRGKGHDGLYQGLSTATKDTYDALHMQALPPR

SEQ ID NO: 319 - protein, 486 aa, Artificial Sequence
  source: /note="Description of Artificial Sequence: Synthetic polypeptide"
MALPVTALLLPLALLLHAARPDIQMTQTTSSLSASLGDRVTISCRASQDISKYLNWYQQKPDGTVKLLIYHTSRLHSGVPSRFSGSGSGTDYSLTISNLEQEDIATYFCQQGNTLPYTFGGGTKLEITGGGGSGGGGSGGGGSEVKLQESGPGLVAPSQSLSVTCTVSGVSLPDYGVSWIRQPPRKGLEWLGVIWGSETTYYNSALKSRLTIIKDNSKSQVFLKMNSLQTDDTAIYYCAKHYYYGGSYAMDYWGQGTSVTVSSTTTPAPRPPTPAPTIASQPLSLRPEACRPAAGGAVHTRGLDFACDIYIWAPLAGTCGVLLLSLVITLYCKRGRKKLLYIFKQPFMRPVQTTQEEDGCSCRFPEEEEGGCELRVKFSRSADAPAYKQGQNQLYNELNLGRREEYDVLDKRRGRDPEMGGKPRRKNPQEGLYNELQKDKMAEAYSEIGMKGERRRGKGHDGLYQGLSTATKDTYDALHMQALPPR

SEQ ID NO: 320 - protein, 493 aa, Artificial Sequence
  source: /note="Description of Artificial Sequence: Synthetic polypeptide"
MALPVTALLLPLALLLHAARPDIVLTQSPASLAVSLGERATINCRASESVSVIGAHLIHWYQQKPGQPPKLLIYLASNLETGVPARFSGSGSGTDFTLTISSLQAEDAAIYYCLQSRIFPRTFGQGTKLEIKGSTSGSGKPGSGEGSTKGQVQLVQSGSELKKPGASVKVSCKASGYTFTDYSINWVRQAPGQGLEWMGWINTETREPAYAYDFRGRFVFSLDTSVSTAYLQISSLKAEDTAVYYCARDYSYAMDYWGQGTLVTVSSAAATTTPAPRPPTPAPTIASQPLSLRPEACRPAAGGAVHTRGLDFACDIYIWAPLAGTCGVLLLSLVITLYCKRGRKKLLYIFKQPFMRPVQTTQEEDGCSCRFPEEEEGGCELRVKFSRSADAPAYQQGQNQLYNELNLGRREEYDVLDKRRGRDPEMGGKPRRKNPQEGLYNELQKDKMAEAYSEIGMKGERRRGKGHDGLYQGLSTATKDTYDALHMQALPPR

SEQ ID NO: 321 - protein, 475 aa, Artificial Sequence
  source: /note="Description of Artificial Sequence: Synthetic polypeptide"
MGVPTQLLGLLLLWITDAICDIQMTQSPASLSTSLGETVTIQCQASEDIYSGLAWYQQKPGKSPQLLIYGASDLQDGVPSRFSGSGSGTQYSLKITSMQTEDEGVYFCQQGLTYPRTFGGGTKLELKGGGGSGGGGSGGGGSEVQLQQSGAELVRPGTSVKLSCKVSGDTITFYYMHFVKQRPGQGLEWIGRIDPEDESTKYSEKFKNKATLTADTSSNTAYLKLSSLTSEDTATYFCIYGGYYFDYWGQGVMVTVSSIEFMYPPPYLDNERSNGTIIHIKEKHLCHTQSSPKLFWALVVVAGVLFCYGLLVTVALCVIWTNSRRNRGGQSDYMNMTPRRPGLTRKPYQPYAPARDFAAYRPRAKFSRSAETAANLQDPNQLFNELNLGRREEFDVLEKKRARDPEMGGKQQRRRNPQEGVYNALQKDKMAEAYSEIGTKGERRRGKGHDGLFQGLSTATKDTFDALHMQTLAPR

SEQ ID NO: 322 - protein, 475 aa, Artificial Sequence
  source: /note="Description of Artificial Sequence: Synthetic polypeptide"
MGVPTQLLGLLLLWITDAICDIQMTQSPASLSTSLGETVTIQCQASEDIYSGLAWYQQKPGKSPQLLIYGASDLQDGVPSRFSGSGSGTQYSLKITSMQTEDEGVYFCQQGLTYPRTFGGGTKLELKGGGGSGGGGSGGGGSEVQLQQSGAELVRPGTSVKLSCKVSGDTITFYYMHFVKQRPGQGLEWIGRIDPEDESTKYSEKFKNKATLTADTSSNTAYLKLSSLTSEDTATYFCIYGGYYFDYWGQGVMVTVSSIEFMYPPPYLDNERSNGTIIHIKEKHLCHTQSSPKLFWALVVVAGVLFCYGLLVTVALCVIWTNSRRNRGGQSDYMNMTPRRPGLTRKPYQPYAPARDFAAYRPRAKFSRSAETAANLQDPNQLYNELNLGRREEYDVLEKKRARDPEMGGKQQRRRNPQEGVYNALQKDKMAEAYSEIGTKGERRRGKGHDGLYQGLSTATKDTYDALHMQTLAPR

SEQ ID NO: 323 - protein, 447 aa, Artificial Sequence
  source: /note="Description of Artificial Sequence: Synthetic polypeptide"
QVQLVQSGVEVKKPGASVKVSCKASGYTFTNYYMYWVRQAPGQGLEWMGGINPSNGGTNFNEKFKNRVTLTTDSSTTTAYMELKSLQFDDTAVYYCARRDYRFDMGFDYWGQGTTVTVSSASTKGPSVFPLAPCSRSTSESTAALGCLVKDYFPEPVTVSWNSGALTSGVHTFPAVLQSSGLYSLSSVVTVPSSSLGTKTYTCNVDHKPSNTKVDKRVESKYGPPCPPCPAPEFLGGPSVFLFPPKPKDTLMISRTPEVTCVVVDVSQEDPEVQFNWYVDGVEVHNAKTKPREEQFNSTYRVVSVLTVLHQDWLNGKEYKCKVSNKGLPSSIEKTISKAKGQPREPQVYTLPPSQEEMTKNQVSLTCLVKGFYPSDIAVEWESNGQPENNYKTTPPVLDSDGSFFLYSRLTVDKSRWQEGNVFSCSVMHEALHNHYTQKSLSLSLGK

SEQ ID NO: 324 - protein, 9 aa, Artificial Sequence
  source: /note="Description of Artificial Sequence: Synthetic peptide"
  VARIANT (5)..(5): /replace="Ser"
  SITE (1)..(9): /note="Variant residues given in the sequence have no preference with respect to those in the annotations for variant positions"
GDVEENPGP

SEQ ID NO: 325 - protein, 440 aa, Artificial Sequence
  source: /note="Description of Artificial Sequence: Synthetic polypeptide"
QVQLVESGGGVVQPGRSLRLDCKASGITFSNSGMHWVRQAPGKGLEWVAVIWYDGSKRYYADSVKGRFTISRDNSKNTLFLQMNSLRAEDTAVYYCATNDDYWGQGTLVTVSSASTKGPSVFPLAPCSRSTSESTAALGCLVKDYFPEPVTVSWNSGALTSGVHTFPAVLQSSGLYSLSSVVTVPSSSLGTKTYTCNVDHKPSNTKVDKRVESKYGPPCPPCPAPEFLGGPSVFLFPPKPKDTLMISRTPEVTCVVVDVSQEDPEVQFNWYVDGVEVHNAKTKPREEQFNSTYRVVSVLTVLHQDWLNGKEYKCKVSNKGLPSSIEKTISKAKGQPREPQVYTLPPSQEEMTKNQVSLTCLVKGFYPSDIAVEWESNGQPENNYKTTPPVLDSDGSFFLYSRLTVDKSRWQEGNVFSCSVMHEALHNHYTQKSLSLSLGK

SEQ ID NO: 326 - protein, 214 aa, Artificial Sequence
  source: /note="Description of Artificial Sequence: Synthetic polypeptide"
EIVLTQSPATLSLSPGERATLSCRASQSVSSYLAWYQQKPGQAPRLLIYDASNRATGIPARFSGSGSGTDFTLTISSLEPEDFAVYYCQQSSNWPRTFGQGTKVEIKRTVAAPSVFIFPPSDEQLKSGTASVVCLLNNFYPREAKVQWKVDNALQSGNSQESVTEQDSKDSTYSLSSTLTLSKADYEKHKVYACEVTHQGLSSPVTKSFNRGEC

SEQ ID NO: 327 - protein, 448 aa, Artificial Sequence
  source: /note="Description of Artificial Sequence: Synthetic polypeptide"
EVQLVESGGGLVQPGGSLRLSCAASGFTFSDSWIHWVRQAPGKGLEWVAWISPYGGSTYYADSVKGRFTISADTSKNTAYLQMNSLRAEDTAVYYCARRHWPGGFDYWGQGTLVTVSSASTKGPSVFPLAPSSKSTSGGTAALGCLVKDYFPEPVTVSWNSGALTSGVHTFPAVLQSSGLYSLSSVVTVPSSSLGTQTYICNVNHKPSNTKVDKKVEPKSCDKTHTCPPCPAPELLGGPSVFLFPPKPKDTLMISRTPEVTCVVVDVSHEDPEVKFNWYVDGVEVHNAKTKPREEQYASTYRVVSVLTVLHQDWLNGKEYKCKVSNKALPAPIEKTISKAKGQPREPQVYTLPPSREEMTKNQVSLTCLVKGFYPSDIAVEWESNGQPENNYKTTPPVLDSDGSFFLYSKLTVDKSRWQQGNVFSCSVMHEALHNHYTQKSLSLSPGK

SEQ ID NO: 328 - protein, 214 aa, Artificial Sequence
  source: /note="Description of Artificial Sequence: Synthetic polypeptide"
DIQMTQSPSSLSASVGDRVTITCRASQDVSTAVAWYQQKPGKAPKLLIYSASFLYSGVPSRFSGSGSGTDFTLTISSLQPEDFATYYCQQYLYHPATFGQGTKVEIKRTVAAPSVFIFPPSDEQLKSGTASVVCLLNNFYPREAKVQWKVDNALQSGNSQESVTEQDSKDSTYSLSSTLTLSKADYEKHKVYACEVTHQGLSSPVTKSFNRGEC

SEQ ID NO: 329 - protein, 450 aa, Artificial Sequence
  source: /note="Description of Artificial Sequence: Synthetic polypeptide"
EVQLLESGGGLVQPGGSLRLSCAASGFTFSSYIMMWVRQAPGKGLEWVSSIYPSGGITFYADTVKGRFTISRDNSKNTLYLQMNSLRAEDTAVYYCARIKLGTVTTVDYWGQGTLVTVSSASTKGPSVFPLAPSSKSTSGGTAALGCLVKDYFPEPVTVSWNSGALTSGVHTFPAVLQSSGLYSLSSVVTVPSSSLGTQTYICNVNHKPSNTKVDKKVEPKSCDKTHTCPPCPAPELLGGPSVFLFPPKPKDTLMISRTPEVTCVVVDVSHEDPEVKFNWYVDGVEVHNAKTKPREEQYNSTYRVVSVLTVLHQDWLNGKEYKCKVSNKALPAPIEKTISKAKGQPREPQVYTLPPSRDELTKNQVSLTCLVKGFYPSDIAVEWESNGQPENNYKTTPPVLDSDGSFFLYSKLTVDKSRWQQGNVFSCSVMHEALHNHYTQKSLSLSPGK

SEQ ID NO: 330 - protein, 216 aa, Artificial Sequence
  source: /note="Description of Artificial Sequence: Synthetic polypeptide"
QSALTQPASVSGSPGQSITISCTGTSSDVGGYNYVSWYQQHPGKAPKLMIYDVSNRPSGVSNRFSGSKSGNTASLTISGLQAEDEADYYCSSYTSSSTRVFGTGTKVTVLGQPKANPTVTLFPPSSEELQANKATLVCLISDFYPGAVTVAWKADGSPVKAGVETTKPSKQSNNKYAASSYLSLTPEQWKSHRSYSCQVTHEGSTVEKTVAPTECS

SEQ ID NO: 331 - protein, 451 aa, Artificial Sequence
  source: /note="Description of Artificial Sequence: Synthetic polypeptide"
EVQLVESGGGLVQPGGSLRLSCAASGFTFSRYWMSWVRQAPGKGLEWVANIKQDGSEKYYVDSVKGRFTISRDNAKNSLYLQMNSLRAEDTAVYYCAREGGWFGELAFDYWGQGTLVTVSSASTKGPSVFPLAPSSKSTSGGTAALGCLVKDYFPEPVTVSWNSGALTSGVHTFPAVLQSSGLYSLSSVVTVPSSSLGTQTYICNVNHKPSNTKVDKRVEPKSCDKTHTCPPCPAPEFEGGPSVFLFPPKPKDTLMISRTPEVTCVVVDVSHEDPEVKFNWYVDGVEVHNAKTKPREEQYNSTYRVVSVLTVLHQDWLNGKEYKCKVSNKALPASIEKTISKAKGQPREPQVYTLPPSREEMTKNQVSLTCLVKGFYPSDIAVEWESNGQPENNYKTTPPVLDSDGSFFLYSKLTVDKSRWQQGNVFSCSVMHEALHNHYTQKSLSLSPGK

SEQ ID NO: 332 - protein, 215 aa, Artificial Sequence
  source: /note="Description of Artificial Sequence: Synthetic polypeptide"
EIVLTQSPGTLSLSPGERATLSCRASQRVSSSYLAWYQQKPGQAPRLLIYDASSRATGIPDRFSGSGSGTDFTLTISRLEPEDFAVYYCQQYGSLPWTFGQGTKVEIKRTVAAPSVFIFPPSDEQLKSGTASVVCLLNNFYPREAKVQWKVDNALQSGNSQESVTEQDSKDSTYSLSSTLTLSKADYEKHKVYACEVTHQGLSSPVTKSFNRGEC

SEQ ID NO: 333 - protein, 133 aa, Homo sapiens [sequence omitted]

SEQ ID NO: 334 - protein, 197 aa, Homo sapiens
RNLPVATPDPGMFPCLHHSQNLLRAVSNMLQKARQTLEFYPCTSEEIDHEDITKDKTSTVEACLPLELTKNESCLNSRETSFITNGSCLASRKTSFMMALCLSSIYEDLKMYQVEFKTMNAKLLMDPKRQIFLDQNMLAVIDELMQALNFNSETVPQKSSLEEPDFYKTKIKLCILLHAFRIRAVTIDRVMSYLNAS

SEQ ID NO: 335 - protein, 306 aa, Homo sapiens
IWELKKDVYVVELDWYPDAPGEMVVLTCDTPEEDGITWTLDQSSEVLGSGKTLTIQVKEFGDAGQYTCHKGGEVLSHSLLLLHKKEDGIWSTDILKDQKEPKNKTFLRCEAKNYSGRFTCWWLTTISTDLTFSVKSSRGSSDPQGVTCGAATLSAERVRGDNKEYEYSVECQEDSACPAAEESLPIEVMVDAVHKLKYENYTSSFFIRDIIKPDPPKNLQLKPLKNSRQVEVSWEYPDTWSTPHSYFSLTFCVQVQGKSKREKKDRVFTDKTSATVICRKNASISVRAQDRYYSSSWSEWASVPCS

SEQ ID NO: 336 - protein, 152 aa, Homo sapiens
DCDIEGKDGKQYESVLMVSIDQLLDSMKEIGSNCLNNEFNFFKRHICDANKEGMFLFRAARKLRQFLKMNSTGDFDLHLLKVSEGTTILLNCTGQVKGRKPAALGEAQPTKSLEENKSLKEQKKLNDLCFLKRLLQEIKTCWNKILMGTKEH

SEQ ID NO: 337 - protein, 160 aa, Homo sapiens
SPGQGTQSENSCTHFPGNLPNMLRDLRDAFSRVKTFFQMKDQLDNLLLKESLLEDFKGYLGCQALSEMIQFYLEEVMPQAENQDPDIKAHVNSLGENLKTLRLRLRRCHRFLPCENKSKAVEQVKNAFNKLQEKGIYKAMSEFDIFINYIEAYMTMKIRN

SEQ ID NO: 338 - protein, 114 aa, Homo sapiens
NWVNVISDLKKIEDLIQSMHIDATLYTESDVHPSCKVTAMKCFLLELQVISLESGDASIHDTVENLIILANNSLSSNGNVTESGCKECEELEEKNIKEFLQSFVHIVQMFINTS

SEQ ID NO: 339 - protein, 157 aa, Homo sapiens
YFGKLESKLSVIRNLNDQVLFIDQGNRPLFEDMTDSDCRDNAPRTIFIISMYKDSQPRGMAVTISVKCEKISTLSCENKIISFKEMNPPDNIKDTKSDIIFFQRSVPGHDNKMQFESSSYEGYFLACEKERDLFKLILKKEDELGDRSIMFTVQNED

SEQ ID NO: 340 - protein, 209 aa, Homo sapiens
RKGPPAALTLPRVQCRASRYPIAVDCSWTLPPAPNSTSPVSFIATYRLGMAARGHSWPCLQQTPTSTSCTITDVQLFSMAPYVLNVTAVHPWGSSSSFVPFITEHIIKPDPPEGVRLSPLAERQLQVQWEPPGSWPFPEIFSLKYWIRYKRQGAARFHRVGPIEATSFILRAVRPRARYYVQVAAQDLTDYGELSDWSLPATATMSLGK

SEQ ID NO: 341 - protein, 138 aa, Homo sapiens
QDPYVKEAENLKKYFNAGHSDVADNGTLFLGILKNWKEESDRKIMQSQIVSFYFKLFKNFKDDQSIQKSVETIKEDMNVKFFNSNKKKRDDFEKLTNYSVTDLNVQRKAIHELIQVMAELSPAAKTGKRKRSQMLFRG

SEQ ID NO: 342 - protein, 112 aa, Homo sapiens
ALDTNYCFSSTEKNCCVRQLYIDFRKDLGWKWIHEPKGYHANFCLGPCPYIWSLDTQYSKVLALYNQHNPGASAAPCCVPQALEPLPIVYYVGRKPKVEQLSNMIVRSCKCS

SEQ ID NO: 343 - protein, 431 aa, Homo sapiens
MPNPRPGKPSAPSLALGPSPGASPSWRAAPKASDLLGARGPGGTFQGRDLRGGAHASSSSLNPMPPSQLQLPTLPLVMVAPSGARLGPLPHLQALLQDRPHFMHQLSTVDAHARTPVLQVHPLESPAMISLTPPTTATGVFSLKARPGLPPGINVASLEWVSREPALLCTFPNPSAPRKDSTLSAVPQSSYPLLANGVCKWPGCEKVFEEPEDFLKHCQADHLLDEKGRAQCLLQREMVQSLEQQLVLEKEKLSAMQAHLAGKMALTKASSVASSDKGSCCIVAAGSQGPVVPAWSGPREAPDSLFAVRRHLWGSHGNSTFPEFLHNMDYFKFHNMRPPFTYATLIRWAILEAPEKQRTLNEIYHWFTRMFAFFRNHPATWKNAIRHNLSLHKCFVRVESEKGAVWTVDELEFRKKRSQRPSRCSNPTPGP

SEQ ID NO: 344 - protein, 417 aa, Homo sapiens
MPNPRPGKPSAPSLALGPSPGASPSWRAAPKASDLLGARGPGGTFQGRDLRGGAHASSSSLNPMPPSQLQLPTLPLVMVAPSGARLGPLPHLQALLQDRPHFMHQLSTVDAHARTPVLQVHPLESPAMISLTPPTTATGVFSLKARPGLPPGINVASLEWVSREPALLCTFPNPSAPRKDSTLSAVPQSSYPLLANGVCKWPGCEKVFEEPEDFLKHCQADHLLDEKGRAQCLLQREMVQSLEQQLVLEKEKLSAMQAHLAGKMALTKASSVASSDKGSCCIVAAGSQGPVVPAWSGPREAPDSLFAVRRHLWGSHGNSTFPEFLHNMDYFKFHNMRPPFTYATLIRWAILEAPEKQRTLNEIYHWFTRMFAFFRNHPATWKNAIRHNLSLHKCFVRVESEKGAVWTVDELEFRKKR

SEQ ID NO: 345 - protein, 366 aa, Homo sapiens
GGAHASSSSLNPMPPSQLQLPTLPLVMVAPSGARLGPLPHLQALLQDRPHFMHQLSTVDAHARTPVLQVHPLESPAMISLTPPTTATGVFSLKARPGLPPGINVASLEWVSREPALLCTFPNPSAPRKDSTLSAVPQSSYPLLANGVCKWPGCEKVFEEPEDFLKHCQADHLLDEKGRAQCLLQREMVQSLEQQLVLEKEKLSAMQAHLAGKMALTKASSVASSDKGSCCIVAAGSQGPVVPAWSGPREAPDSLFAVRRHLWGSHGNSTFPEFLHNMDYFKFHNMRPPFTYATLIRWAILEAPEKQRTLNEIYHWFTRMFAFFRNHPATWKNAIRHNLSLHKCFVRVESEKGAVWTVDELEFRKKR

SEQ ID NO: 346 - protein, 787 aa, Homo sapiens
MAVWIQAQQLQGEALHQMQALYGQHFPIEVRHYLSQWIESQAWDSVDLDNPQENIKATQLLEGLVQELQKKAEHQVGEDGFLLKIKLGHYATQLQNTYDRCPMELVRCIRHILYNEQRLVREANNGSSPAGSLADAMSQKHLQINQTFEELRLVTQDTENELKKLQQTQEYFIIQYQESLRIQAQFGPLAQLSPQERLSRETALQQKQVSLEAWLQREAQTLQQYRVELAEKHQKTLQLLRKQQTIILDDELIQWKRRQQLAGNGGPPEGSLDVLQSWCEKLAEIIWQNRQQIRRAEHLCQQLPIPGPVEEMLAEVNATITDIISALVTSTFIIEKQPPQVLKTQTKFAATVRLLVGGKLNVHMNPPQVKATIISEQQAKSLLKNENTRNDYSGEILNNCCVMEYHQATGTLSAHFRNMSLKRIKRSDRRGAESVTEEKFTILFESQFSVGGNELVFQVKTLSLPVVVIVHGSQDNNATATVLWDNAFAEPGRVPFAVPDKVLWPQLCEALNMKFKAEVQSNRGLTKENLVFLAQKLFNNSSSHLEDYSGLSVSWSQFNRENLPGRNYTFWQWFDGVMEVLKKHLKPHWNDGAILGFVNKQQAHDLLINKPDGTFLLRFSDSEIGGITIAWKFDSQERMFWNLMPFTTRDFSIRSLADRLGDLNYLIYVFPDRPKDEVYSKYYTPVPCESATAKAVDGYVKPQIKQVVPEFVNASADAGGGSATYMDQAPSPAVCPQAHYNMYPQNPDSVLDTDGDFDLEDTMDVARRVEELLGRPMDSQWIPHAQS

SEQ ID NO: 347 - protein, 526 aa, Homo sapiens [sequence omitted]

SEQ ID NO: 348 - DNA, 625 bp, Unknown
  source: /note="Description of Unknown: AP1.0 sequence"
attctcgggctacggccctggagccactccggctcctaaagatttagaagtttgagcacacccgcccactagggccccccatccaggggggcaacgggcaagcacttctgtttccccggtatgatctgataggctgtaaccacggctgaaacagagattatcgttatccgcttcactacttcgagaagcctagtaatgatgggtgaaattgaatccgttgatccggtgtctcccccacaccagaaactcatgatgagggttgccatcccggctacggcgacgtagcgggcatccctgcgctggcatgaggcctcttaggaggacggatgatatggatcttgtcgtgaagagcctattgagctagtgtcgactcctccgcccccgtgaatgcggctaatcctaaccccggagcaggtgggtccaatccagggcctggcctgtcgtaatgcgtaagtctgggacggaaccgactactttcgggaaggcgtgtttccatttgttcattatttgtgtgtttatggtgacaactctgggtaaacgttctattgcgtttattgagagattcccaacaattgaacaaacgagaactacctgttttattaaatttacacagagaagaattaca

SEQ ID NO: 349 - DNA, 549 bp, Unknown
  source: /note="Description of Unknown: CK1.0 sequence"
gtggccacgcccgggccaccgatacttcccttcactccttcgggactgttggggaggaacacaacagggctcccctgttttcccattccttcccccttttcccaaccccaaccgccgtatctggtggcggcaagacacacgggtctttccctctaaagcacaattgtgtgtgtgtcccaggtcctcctgcgtacggtgcgggagtgctcccacccaactgttgtaagcctgtccaacgcgtcgtcctggcaagactatgacgtcgcatgttccgctgcggatgccgaccgggtaaccggttccccagtgtgtgtagtgcgatcttccaggtcctcctggttggcgttgtccagaaactgcttcaggtaagtggggtgtgcccaatccctacaaaggttgattctttcaccaccttaggaatgctccggaggtaccccagcaacagctgggatctgaccggaggctaattgtctacgggtggtgtttcctttttcttttcacacaactctactgctgacaactcactgactatccacttgctctgtcacg

SEQ ID NO: 350 - DNA, 630 bp, Unknown
  source: /note="Description of Unknown: PV1.0 sequence"
aacaaaaggctacaccacttgggctacggcccgcgccaccttgtggcgcaaagacattagaagaatagcataccgcccactagggccctgcagccagcagggtaacgggcaagcacttctgtctccccggtagaacggtataggctgtacccacggccgaaaactgaactatcgttacccgactccgtacttcgcaaagcttagtaggaaactggaaagttcgagttattgacccggagtgttccccccactccagaaacgcgtgatgagggttgccaccccgaccatggcgacatggtgggcatccctgcgctggcacgcggcctctaagaggataactcgctcctactggtaaccgaagagccccgtgagctacggtttattcctccgcctccctgaatgcggctaatcctaacccatgagcagttgccatagatccatatggtggactgtcgtaacgcgtaagttgtgggcggaaccgactactttgggatggcgtgtttccttgttttctccatttgttgttgtatggtgacaagttatagatctcgatctatagcgtttcttgagagatttccaaacatttattcaagtcgtacaattcttgtgtttaagcagtacagtgtaacc

SEQ ID NO: 351 - DNA, 653 bp, Unknown
  source: /note="Description of Unknown: SV1.0 sequence"
tctgtcctcaccccatcttcccttctttcctgcaccgttacgcttactcgcatgtgcattgagtggtgcacgtgcttgaacaaacagctacactcacatgggggcgggttttcccgccctgcggcctctcgcgaggcccacccctccccttcctcccataactacagtgctttggtaggtaagcatcctgatcccccgcggaagctgctcacgtggcaactgtggggacccagacaggttatcaaaggcacccggtctttccgccttcaggagtatccctgctagtgaattctagtagggctctgcttggtgccaacctcccccaaatgcgcgctgcgggagtgctcttccccaactcaccctagtatcctctcatgtgtgtgcttggtcagcatatctgagacgatgttccgctgtcccagaccagtccagtaatggacgggccagtgtgcgtagtcgtcttccggcttgtccggcgcatgtttggtgaaccggtggggtaaggttggtgtgcccaacgcccgtactttggtgatacctcaagaccacccaggaatgccagggaggtaccccgcttcacagcgggatctgaccctgggctaattgtctacggtggttcttcttgcttccacttctttctactgttcgccacc

SEQ ID NO: 352 - DNA, 635 bp, Artificial Sequence
  source: /note="Description of Artificial Sequence: Synthetic polynucleotide"
gtggccacgcccgggccaccgatacttcccttcactccttcgggactgttggggaggaacacaacagggctcccctgttttcccattccttcccccttttcccaaccccaaccgccgtatctggtggcggcaagacacacgggtctttccctctaaagcacaattgtgtgtgtgtcccaggtcctcctgcgtacggtgcgggagtgctcccacccaactgttgtaagcctgtccaacgcgtcgtcctggcaagactatgacgtcgcatgttccgctgcggatgccgaccgggtaaccggttccccagtgtgtgtagtgcgatcttccaggtcctcctggttggcgttgtccagaaactgcttcaggtaagtggggtgtgcccaatccctacaaaggttgattctttcaccaccttaggaatgctccggaggtaccccagcaacagctgggatctgaccggaggctaattgtctacgggtggtgtttcctttttcttttcacacaactctactgctgacaactcactgactatccacttgctctcttgtgcctttctgctctggttcaagttccttgattgtttttgactgcttttcactgcttttcttctcacaatccttgctcagttcaaagtc

SEQ ID NO: 353 - DNA, 513 bp, Artificial Sequence
  source: /note="Description of Artificial Sequence: Synthetic polynucleotide"
gtggccacgcccgggccaccgatacttcccttcactccttcgggactgttggggaggaacacaacagggctcccctgttttcccattccttcccccttttcccaaccccaaccgccgtatctggtggcggcaagacacacgggtctttccctctaaagcacaattgtgtgtgtgtcccaggtcctcctgcgtacggtgcgggagtgctcccacccaactgttgtaagcctgtccaacgcgtcgtcctggcaagactatgacgtcgcatgttccgctgcggatgccgaccgggtaaccggttccccagtgtgtgtagtgcgatcttccaggtcctcctggttggcgttgtccagaaactgcttcaggtaagtggggtgtgcccaatccctacaaaggttgattctttcaccaccttaggaatgctccggaggtaccccagcaacagctgggatctgaccggaggctaattgtctacgggtggtgtttcctttttcttttcacacaactaaagtc

SEQ ID NO: 354 - DNA, 549 bp, Artificial Sequence
  source: /note="Description of Artificial Sequence: Synthetic polynucleotide"
gtggccacgcccgggccaccgatacttcccttcactccttcgggactgttggggaggaacacaacagggctcccctgttttcccattccttcccccttttcccaaccccaaccgccgtatctggtggcggcaagacacacgggtctttccctctaaagcacaattgtgtgtgtgtcccaggtcctcctgcgtacggtgcgggagtgctcccacccaactgttgtaagcctgtccaacgcgtcgtcctggcaagactatgacgtcgcatgttccgctgcggatgccgaccgggtaaccggttccccagtgtgtgtagtgcgatcttccaggtcctcctggttggcgttgtccagaaactgcttcaggtaagtggggtgtgcccaatccctacaaaggttgattctttcaccaccttaggaatgctccggaggtaccccagcaacagctgggatctgaccggaggctaattgtctacgggtggtgtttcctttttcttttcacacaactctactgctgacaactcactgactatccacttgctctaaagtc

SEQ ID NO: 355 - DNA, 513 bp, Artificial Sequence
  source: /note="Description of Artificial Sequence: Synthetic polynucleotide"
gtggccacgcccgggccaccgatacttcccttcactccttcgggactgttggggaggaacacaacagggctcccctgttttcccattccttcccccttttcccaaccccaaccgccgtatctggtggcggcaagacacacgggtctttccctctaaagcacaattgtgtgtgtgtcccaggtcctcctgcgtacggtgcgggagtgctcccacccaactgttgtaagcctgtccaacgcgtcgtcctggcaagactatgacgtcgcatgttccgctgcggatgccgaccgggtaaccggttccccagtgtgtgtagtgcgatcttccaggtcctcctggttggcgttgtccagaaactgcttcaggtaagtggggtgtgcccaatccctacaaaggttgattctttcaccaccttaggaatgctccggaggtaccccagcaacagctgggatctgaccggaggctaattgtctacgggtggtgtttcctttttcttttcacacaactgccacc

SEQ ID NO: 356 - DNA, 549 bp, Artificial Sequence
  source: /note="Description of Artificial Sequence: Synthetic polynucleotide"
gtggccacgcccgggccaccgatacttcccttcactccttcgggactgttggggaggaacacaacagggctcccctgttttcccattccttcccccttttcccaaccccaaccgccgtatctggtggcggcaagacacacgggtctttccctctaaagcacaattgtgtgtgtgtcccaggtcctcctgcgtacggtgcgggagtgctcccacccaactgttgtaagcctgtccaacgcgtcgtcctggcaagactatgacgtcgcatgttccgctgcggatgccgaccgggtaaccggttccccagtgtgtgtagtgcgatcttccaggtcctcctggttggcgttgtccagaaactgcttcaggtaagtggggtgtgcccaatccctacaaaggttgattctttcaccaccttaggaatgctccggaggtaccccagcaacagctgggatctgaccggaggctaattgtctacgggtggtgtttcctttttcttttcacacaactttcactgcttttcttctcacaatccttgctcagttcaaagtc

SEQ ID NO: 357 - DNA, 678 bp, Parabovirus sp.
tgaaccgttacgcaccactcagttggtgtttggtggcaccaatgatggaacaaaaggctacaccacttgggctacggcccgcgccaccttgtggcgcaaagacattagaagaatagcataccgcccactagggccctgcagccagcagggtaacgggcaagcacttctgtctccccggtagaacggtataggctgtacccacggccgaaaactgaactatcgttacccgactccgtacttcgcaaagcttagtaggaaactggaaagttcgagttattgacccggagtgttccccccactccagaaacgcgtgatgagggttgccaccccgaccatggcgacatggtgggcatccctgcgctggcacgcggcctctaagaggataactcgctcctactggtaaccgaagagccccgtgagctacggtttattcctccgcctccctgaatgcggctaatcctaacccatgagcagttgccatagatccatatggtggactgtcgtaacgcgtaagttgtgggcggaaccgactactttgggatggcgtgtttccttgttttctccatttgttgttgtatggtgacaagttatagatctcgatctatagcgtttcttgagagatttccaaacatttattcaagtcgtacaattcttgtgtttaagcagtacagtgtaagg

SEQ ID NO: 358 - DNA, 630 bp, Artificial Sequence
  source: /note="Description of Artificial Sequence: Synthetic polynucleotide"
aacaaaaggctacaccacttgggctacggcccgcgccaccttgtggcgcaaagacattagaagaatagcataccgcccactagggccctgcagccagcagggtaacgggcaagcacttctgtctccccggtagaacggtataggctgtacccacggccgaaaactgaactatcgttacccgactccgtacttcgcaaagcttagtaggaaactggaaagttcgagttattgacccggagtgttccccccactccagaaacgcgtgatgagggttgccaccccgaccatggcgacatggtgggcatccctgcgctggcacgcggcctctaagaggataactcgctcctactggtaaccgaagagccccgtgagctacggtttattcctccgcctccctgaatgcggctaatcctaacccatgagcagttgccatagatccatatggtggactgtcgtaacgcgtaagttgtgggcggaaccgactactttgggatggcgtgtttccttgttttctccatttgttgttgtatggtgacaagttatagatctcgatctatagcgtttcttgagagatttccaaacatttattcaagtcgtacaattcttgtgtttaagcagtacagtgtaagg

SEQ ID NO: 359 - DNA, 611 bp, Artificial Sequence
  source: /note="Description of Artificial Sequence: Synthetic polynucleotide"
tgggctacggcccgcgccaccttgtggcgcaaagacattagaagaatagcataccgcccactagggccctgcagccagcagggtaacgggcaagcacttctgtctccccggtagaacggtataggctgtacccacggccgaaaactgaactatcgttacccgactccgtacttcgcaaagcttagtaggaaactggaaagttcgagttattgacccggagtgttccccccactccagaaacgcgtgatgagggttgccaccccgaccatggcgacatggtgggcatccctgcgctggcacgcggcctctaagaggataactcgctcctactggtaaccgaagagccccgtgagctacggtttattcctccgcctccctgaatgcggctaatcctaacccatgagcagttgccatagatccatatggtggactgtcgtaacgcgtaagttgtgggcggaaccgactactttgggatggcgtgtttccttgttttctccatttgttgttgtatggtgacaagttatagatctcgatctatagcgtttcttgagagatttccaaacatttattcaagtcgtacaattcttgtgtttaagcagtacagtgtaagg

SEQ ID NO: 360 - DNA, 618 bp, Artificial Sequence
  source: /note="Description of Artificial Sequence: Synthetic polynucleotide"
tgaaccgttacgcaccactcagttggtgtttggtggcaccaatgatggaacaaaaggctacaccacttgggctacggcccgcgccaccttgtggcgcaaagacattagaagaatagcataccgcccactagggccctgcagccagcagggtaacgggcaagcacttctgtctccccggtagaacggtataggctgtacccacggccgaaaactgaactatcgttacccgactccgtacttcgcaaagcttagtaggaaactggaaagttcgagttattgacccggagtgttccccccactccagaaacgcgtgatgagggttgccaccccgaccatggcgacatggtgggcatccctgcgctggcacgcggcctctaagaggataactcgctcctactggtaaccgaagagccccgtgagctacggtttattcctccgcctccctgaatgcggctaatcctaacccatgagcagttgccatagatccatatggtggactgtcgtaacgcgtaagttgtgggcggaaccgactactttgggatggcgtgtttccttgttttctccatttgttgttgtatggtgacaagttatagatctcgatctatagcgtttgtaagg

SEQ ID NO: 361 - DNA, 826 bp, Unknown
  source: /note="Description of Unknown: Apodemus Picornavirus sequence"
tttgaaaggggtgcggatatcatggcgtttctcgccatgatatccgcacattgcaaacccatattgcatacccactgggtatgcattatggggaggcccctttcacccctccccccccaattaccttttccccctctagtaaccatacgctttactcagcgtaactactccgggttacgtgatgaagaagaggctacggagattctcgggctacggccctggagccactccggctcctaaagatttagaagtttgagcacacccgcccactagggccccccatccaggggggcaacgggcaagcacttctgtttccccggtatgatctgataggctgtaaccacggctgaaacagagattatcgttatccgcttcactacttcgagaagcctagtaatgatgggtgaaattgaatccgttgatccggtgtctcccccacaccagaaactcatgatgagggttgccatcccggctacggcgacgtagcgggcatccctgcgctggcatgaggcctcttaggaggacggatgatatggatcttgtcgtgaagagcctattgagctagtgtcgactcctccgcccccgtgaatgcggctaatcctaaccccggagcaggtgggtccaatccagggcctggcctgtcgtaatgcgtaagtctgggacggaaccgactactttcgggaaggcgtgtttccatttgttcattatttgtgtgtttatggtgacaactctgggtaaacgttctattgcgtttattgagagattcccaacaattgaacaaacgagaactacctgttttattaaatttacacagagaagaattaca

SEQ ID NO: 362 - DNA, 721 bp, Artificial Sequence
  source: /note="Description of Artificial Sequence: Synthetic polynucleotide"
cccctccccccccaattaccttttccccctctagtaaccatacgctttactcagcgtaactactccgggttacgtgatgaagaagaggctacggagattctcgggctacggccctggagccactccggctcctaaagatttagaagtttgagcacacccgcccactagggccccccatccaggggggcaacgggcaagcacttctgtttccccggtatgatctgataggctgtaaccacggctgaaacagagattatcgttatccgcttcactacttcgagaagcctagtaatgatgggtgaaattgaatccgttgatccggtgtctcccccacaccagaaactcatgatgagggttgccatcccggctacggcgacgtagcgggcatccctgcgctggcatgaggcctcttaggaggacggatgatatggatcttgtcgtgaagagcctattgagctagtgtcgactcctccgcccccgtgaatgcggctaatcctaaccccggagcaggtgggtccaatccagggcctggcctgtcgtaatgcgtaagtctgggacggaaccgactactttcgggaaggcgtgtttccatttgttcattatttgtgtgtttatggtgacaactctgggtaaacgttctattgcgtttattgagagattcccaacaattgaacaaacgagaactacctgttttattaaatttacacagagaagaattaca

SEQ ID NO: 363 - DNA, 625 bp, Artificial Sequence; identical to SEQ ID NO: 348
  source: /note="Description of Artificial Sequence: Synthetic polynucleotide"

SEQ ID NO: 364 - DNA, 766 bp, Kobuvirus sp.
tttcacaccctcttttccggtggtccggacccagaccaccgttactccattcagctacttcggtacctgttcggaggaattaaacgggcaccctacccaagggttacatgggaccatattcctcctcccctgtaactttaagttttgtgcccgtattcttgactccaggcggatgttgtgtcgcccgtcctgtgaacaaacagctagacactttcctcccctccctctgggctgctccggcagtccactccctccccccagcgtaacatgccccgctggagtgatgcacctggaagtcgtggacgtgggttagtaacttcggtgaaaacccactataatgacaactggttgacccccacactcaaaggactcgagtctttctcccttaaggctagcccggccacatgaatttgcagctggcaactagtgagtccaccatgtcccgcaacctcggctgcggagtgctgttccccaagcgtatgccttccttctgtaagagtgcgcctggcaagcacatctgagaagtcgttccgctgcgtcgtgccaacctggcgacaggtgacccagtgtgcgtagacttcttccggattcgtccggctcttctctaggaaacatgcgtgtaaggttcatgtgccaaagccctgcgcgcggtgttcttctactgccctaggaatgtgccgcaggtacccctacttcggtagggatctgagcggtagctaattgtctacgggtagtttcatttccatcttctcttcaggtcgacatc

SEQ ID NO: 365 - DNA, 608 bp, Artificial Sequence
  source: /note="Description of Artificial Sequence: Synthetic polynucleotide"
ttgactccaggcggatgttgtgtcgcccgtcctgtgaacaaacagctagacactttcctcccctccctctgggctgctccggcagtccactccctccccccagcgtaacatgccccgctggagtgatgcacctggaagtcgtggacgtgggttagtaacttcggtgaaaacccactataatgacaactggttgacccccacactcaaaggactcgagtctttctcccttaaggctagcccggccacatgaatttgcagctggcaactagtgagtccaccatgtcccgcaacctcggctgcggagtgctgttccccaagcgtatgccttccttctgtaagagtgcgcctggcaagcacatctgagaagtcgttccgctgcgtcgtgccaacctggcgacaggtgacccagtgtgcgtagacttcttccggattcgtccggctcttctctaggaaacatgcgtgtaaggttcatgtgccaaagccctgcgcgcggtgttcttctactgccctaggaatgtgccgcaggtacccctacttcggtagggatctgagcggtagctaattgtctacgggtagtttcatttccatcttctcttcaggtcgacatc

SEQ ID NO: 366 - DNA, 690 bp, Artificial Sequence
  source: /note="Description of Artificial Sequence: Synthetic polynucleotide"
gaattaaacgggcaccctacccaagggttacatgggaccatattcctcctcccctgtaactttaagttttgtgcccgtattcttgactccaggcggatgttgtgtcgcccgtcctgtgaacaaacagctagacactttcctcccctccctctgggctgctccggcagtccactccctccccccagcgtaacatgccccgctggagtgatgcacctggaagtcgtggacgtgggttagtaacttcggtgaaaacccactataatgacaactggttgacccccacactcaaaggactcgagtctttctcccttaaggctagcccggccacatgaatttgcagctggcaactagtgagtccaccatgtcccgcaacctcggctgcggagtgctgttccccaagcgtatgccttccttctgtaagagtgcgcctggcaagcacatctgagaagtcgttccgctgcgtcgtgccaacctggcgacaggtgacccagtgtgcgtagacttcttccggattcgtccggctcttctctaggaaacatgcgtgtaaggttcatgtgccaaagccctgcgcgcggtgttcttctactgccctaggaatgtgccgcaggtacccctacttcggtagggatctgagcggtagctaattgtctacgggtagtttcatttccatcttctcttcaggtcgacatc

SEQ ID NO: 367 - DNA, 729 bp, Artificial Sequence
  source: /note="Description of Artificial Sequence: Synthetic polynucleotide"
tttcacaccctcttttccggtggtccggacccagaccaccgttactccattcagctacttcggtacctgttcggaggaattaaacgggcaccctacccaagggttacatgggaccatattcctcctcccctgtaactttaagttttgtgcccgtattcttgactccaggcggatgttgtgtcgcccgtcctgtgaacaaacagctagacactttcctcccctccctctgggctgctccggcagtccactccctccccccagcgtaacatgccccgctggagtgatgcacctggaagtcgtggacgtgggttagtaacttcggtgaaaacccactataatgacaactggttgacccccacactcaaaggactcgagtctttctcccttaaggctagcccggccacatgaatttgcagctggcaactagtgagtccaccatgtcccgcaacctcggctgcggagtgctgttccccaagcgtatgccttccttctgtaagagtgcgcctggcaagcacatctgagaagtcgttccgctgcgtcgtgccaacctggcgacaggtgacccagtgtgcgtagacttcttccggattcgtccggctcttctctaggaaacatgcgtgtaaggttcatgtgccaaagccctgcgcgcggtgttcttctactgccctaggaatgtgccgcaggtacccctacttcggtagggatctgagcggtagctaattggacatc

SEQ ID NO: 368 - DNA, 650 bp, Salivirus sp.; identical to SEQ ID NO: 63

SEQ ID NO: 369 - DNA, 508 bp, Crohivirus B; identical to SEQ ID NO: 20

SEQ ID NO: 370 - DNA, 457 bp, Artificial Sequence
  source: /note="Description of Artificial Sequence: Synthetic polynucleotide"
ccccccttttccccagccatgggttaaatggcaataaaggacgtaacaactttgtaaccattaagctttgtaattttgtaaccactaagctttgtgcacataatgtaaccatcaagcttgttagtcccagcaggaggtttgcatgcttgtagccgaaatggggctcgaccccccatagtaggatacttgattttgcattccattgtggacctgcaaactctacacatagaggctttgtcttgcatctaaacacctgagtacagtgtgtacctagaccctatagtacgggaggaccgtttgtttcctcaataaccctacataataggctaggtgggcatgcccaatttgcaagatcccagactgggggtcggtctgggcagggttagatccctgttagctactgcctgatagggtggtgctcaaccatgtgtagtttaaattgagctgttcatatacc

SEQ ID NO: 371 - DNA, 742 bp, Unknown
  source: /note="Description of Unknown: CVB3 sequence"
ttaaaacagcctgtgggttgatcccacccacagggcccattgggcgctagcactctggtatcacggtacctttgtgcgcctgttttataccccctcccccaactgtaacttagaagtaacacacaccgatcaacagtcagcgtggcacaccagccacgttttgatcaagcacttctgttaccccggactgagtatcaatagactgctcacgcggttgaaggagaaagcgttcgttatccggccaactacttcgaaaaacctagtaacaccgtggaagttgcagagtgtttcgctcagcactaccccagtgtagatcaggtcgatgagtcaccgcattccccacgggcgaccgtggcggtggctgcgttggcggcctgcccatggggaaacccatgggacgctctaatacagacatggtgcgaagagtctattgagctagttggtagtcctccggcccctgaatgcggctaatcctaactgcggagcacacaccctcaagccagagggcagtgtgtcgtaacgggcaactctgcagcggaaccgactactttgggtgtccgtgtttcattttattcctatactggctgcttatggtgacaattgagagattgttaccatatagctattggattggccatccggtgaccaatagagctattatatatctctttgttgggtttataccacttagcttgaaagaggttaaaacattacaattcattgttaagttgaatacagcaaa

SEQ ID NO: 372 - DNA, 651 bp, Artificial Sequence
  source: /note="Description of Artificial Sequence: Synthetic polynucleotide"
ttaaaacagcctgtgggttgatcccacccacagggcccattgggcgctagcactctggtatcacggtacctttgtgcgcctgttttataccccctcccccaactgtaacttagaagtaacacacaccgatcaacagtcagcgtggcacaccagccacgttttgatcaagcacttctgttaccccggactgagtatcaatagactgctcacgcggttgaaggagaaagcgttcgttatccggccaactacttcgaaaaacctagtaacaccgtggaagttgcagagtgtttcgctcagcactaccccagtgtagatcaggtcgatgagtcaccgcattccccacgggcgaccgtggcggtggctgcgttggcggcctgcccatggggaaacccatgggacgctctaatacagacatggtgcgaagagtctattgagctagttggtagtcctccggcccctgaatgcggctaatcctaactgcggagcacacaccctcaagccagagggcagtgtgtcgtaacgggcaactctgcagcggaaccgactactttgggtgtccgtgtttcattttattcctatactggctgcttatggtgacaattgagagattgttaccatatagctattggattggccatccggtgaagcaaa

SEQ ID NO: 373 - DNA, 721 bp, Unknown
  source: /note="Description of Unknown: SAFV sequence"
cacttatttaattcggccttttgtgacaagcccctcggtgaaagaacctctctcttttcgacgtggttggaattgccatcatttccgacgaaagtgctatcatgcctccccgattatgtgatgttttctgccctgctgggcggagcattctcgggttgagaaaccttgaatctttttctttggaaccttggttcccccggtctaagccgcttggaatatgacagggttattttcttgatcttatttctacttttgcgggttctatccgtaaaaagggtacgtgctgccccttccttctctggagaattcacacggcggtctttccgtctctcaacaagtgtgaatgcagcatgccggaaacggtgaagaaaacagttttctgtggaaatttagagtgcacatcgaaacagctgtagcgacctcacagtagcagcggactcccctcttggcgacaagagcctctgcggccaaaagccccgtggataagatccactgctgtgagcggtgcaaccccagcaccctggttcgatgatcattctctatggaaccagaaaatggttttctcaagccctccggtagagaagccaagaatgtcctgaaggtaccccgcgtgcgggatctgatcaggagaccaattggcggtgctttacactgtcactttggtttaaaaattgtcacagcttctccaaaccaagtggtcttggttttccaattttgttga

SEQ ID NO: 374 - DNA, 675 bp, Artificial Sequence
  source: /note="Description of Artificial Sequence: Synthetic polynucleotide"
cctctctcttttcgacgtggttggaattgccatcatttccgacgaaagtgctatcatgcctccccgattatgtgatgttttctgccctgctgggcggagcattctcgggttgagaaaccttgaatctttttctttggaaccttggttcccccggtctaagccgcttggaatatgacagggttattttcttgatcttatttctacttttgcgggttctatccgtaaaaagggtacgtgctgccccttccttctctggagaattcacacggcggtctttccgtctctcaacaagtgtgaatgcagcatgccggaaacggtgaagaaaacagttttctgtggaaatttagagtgcacatcgaaacagctgtagcgacctcacagtagcagcggactcccctcttggcgacaagagcctctgcggccaaaagccccgtggataagatccactgctgtgagcggtgcaaccccagcaccctggttcgatgatcattctctatggaaccagaaaatggttttctcaagccctccggtagagaagccaagaatgtcctgaaggtaccccgcgtgcgggatctgatcaggagaccaattggcggtgctttacactgtcactttggtttaaaaattgtcacagcttctccaaaccaagtggtcttggttttccaattttgttga

SEQ ID NO: 375 - DNA, 628 bp, Artificial Sequence
  source: /note="Description of Artificial Sequence: Synthetic polynucleotide"
gtgctatcatgcctccccgattatgtgatgttttctgccctgctgggcggagcattctcgggttgagaaaccttgaatctttttctttggaaccttggttcccccggtctaagccgcttggaatatgacagggttattttcttgatcttatttctacttttgcgggttctatccgtaaaaagggtacgtgctgccccttccttctctggagaattcacacggcggtctttccgtctctcaacaagtgtgaatgcagcatgccggaaacggtgaagaaaacagttttctgtggaaatttagagtgcacatcgaaacagctgtagcgacctcacagtagcagcggactcccctcttggcgacaagagcctctgcggccaaaagccccgtggataagatccactgctgtgagcggtgcaaccccagcaccctggttcgatgatcattctctatggaaccagaaaatggttttctcaagccctccggtagagaagccaagaatgtcctgaaggtaccccgcgtgcgggatctgatcaggagaccaattggcggtgctttacactgtcactttggtttaaaaattgtcacagcttctccaaaccaagtggtcttggttttccaattttgttga

SEQ ID NO: 376 - DNA, 674 bp, Artificial Sequence
  source: /note="Description of Artificial Sequence: Synthetic polynucleotide"
cacttatttaattcggccttttgtgacaagcccctcggtgaaagaacctctctcttttcgacgtggttggaattgccatcatttccgacgaaagtgctatcatgcctccccgattatgtgatgttttctgccctgctgggcggagcattctcgggttgagaaaccttgaatctttttctttggaaccttggttcccccggtctaagccgcttggaatatgacagggttattttcttgatcttatttctacttttgcgggttctatccgtaaaaagggtacgtgctgccccttccttctctggagaattcacacggcggtctttccgtctctcaacaagtgtgaatgcagcatgccggaaacggtgaagaaaacagttttctgtggaaatttagagtgcacatcgaaacagctgtagcgacctcacagtagcagcggactcccctcttggcgacaagagcctctgcggccaaaagccccgtggataagatccactgctgtgagcggtgcaaccccagcaccctggttcgatgatcattctctatggaaccagaaaatggttttctcaagccctccggtagagaagccaagaatgtcctgaaggtaccccgcgtgcgggatctgatcaggagaccaattggcggtgctttacactgtcactttggtttaatgttga

SEQ ID NO: 377 - DNA, 726 bp, Artificial Sequence
  source: /note="Description of Artificial Sequence: Synthetic polynucleotide"
cacttatttaattcggccttttgtgacaagcccctcggtgaaagaacctctctcttttcgacgtggttggaattgccatcatttccgacgaaagtgctatcatgcctccccgattatgtgatgttttctgccctgctgggcggagcattctcgggttgagaaaccttgaatctttttctttggaaccttggttcccccggtctaagccgcttggaatatgacagggttattttcttgatcttatttctacttttgcgggttctatccgtaaaaagggtacgtgctgccccttccttctctggagaattcacacggcggtctttccgtctctcaacaagtgtgaatgcagcatgccggaaacggtgaagaaaacagttttctgtggaaatttagagtgcacatcgaaacagctgtagcgacctcacagtagcagcggactcccctcttggcgacaagagcctctgcggccaaaagccccgtggataagatccactgctgtgagcggtgcaaccccagcaccctggttcgatgatcattctctatggaaccagaaaatggttttctcaagccctccggtagagaagccaagaatgtcctgaaggtaccccgcgtgcgggatctgatcaggagaccaattggcggtgctttacactgtcactttggtttaaaaattgtcacagcttctccaaaccaagtggtcttggttttccaattttgttgaccgcc

SEQ ID NO: 378 - DNA, 549 bp, Unknown
  source: /note="Description of Unknown: GLuc CK dCTG1 sequence"
gtggccacgcccgggccaccgatacttcccttcactccttcgggactgttggggaggaacacaacagggctcccctgttttcccattccttcccccttttcccaaccccaaccgccgtatctggtggcggcaagacacacgggtctttccctctaaagcacaattgtgtgtgtgtcccaggtcctcctgcgtacggtgcgggagtgctcccacccaactgttgtaagcctgtccaacgcgtcgtcctggcaagactatgacgtcgcatgttccgctgcggatgccgaccgggtaaccggttccccagtgtgtgtagtgcgatcttccaggtcctcctggttggcgttgtccagaaactgcttcaggtaagtggggtgtgcccaatccctacaaaggttgattctttcaccaccttaggaatgctccggaggtaccccagcaacagctgggatctgaccggaggctaattgtctacgggtggtgtttcctttttcttttcacacaactctacgtctgacaactcactgactatccacttgctctaaagtc

SEQ ID NO: 379 - DNA, 549 bp, Unknown
  source: /note="Description of Unknown: GLuc CK dCTG1_2 sequence"
gtggccacgcccgggccaccgatacttcccttcactccttcgggactgttggggaggaacacaacagggctcccctgttttcccattccttcccccttttcccaaccccaaccgccgtatctggtggcggcaagacacacgggtctttccctctaaagcacaattgtgtgtgtgtcccaggtcctcctgcgtacggtgcgggagtgctcccacccaactgttgtaagcctgtccaacgcgtcgtcctggcaagactatgacgtcgcatgttccgctgcggatgccgaccgggtaaccggttccccagtgtgtgtagtgcgatcttccaggtcctcctggttggcgttgtccagaaactgcttcaggtaagtggggtgtgcccaatccctacaaaggttgattctttcaccaccttaggaatgctccggaggtaccccagcaacagctgggatctgaccggaggctaattgtctacgggtggtgtttcctttttcttttcacacaactctacgtcgtacaactcactgactatccacttgctctaaagtc

SEQ ID NO: 380 - DNA, 549 bp, Unknown
  source: /note="Description of Unknown: GLuc CK dCTG1_2_3 sequence"
gtggccacgcccgggccaccgatacttcccttcactccttcgggactgttggggaggaacacaacagggctcccctgttttcccattccttcccccttttcccaaccccaaccgccgtatctggtggcggcaagacacacgggtctttccctctaaagcacaattgtgtgtgtgtcccaggtcctcctgcgtacggtgcgggagtgctcccacccaactgttgtaagcctgtccaacgcgtcgtcctggcaagactatgacgtcgcatgttccgctgcggatgccgaccgggtaaccggttccccagtgtgtgtagtgcgatcttccaggtcctcctggttggcgttgtccagaaactgcttcaggtaagtggggtgtgcccaatccctacaaaggttgattctttcaccaccttaggaatgctccggaggtaccccagcaacagctgggatctgaccggaggctaattgtctacgggtggtgtttcctttttcttttcacacaactctacgtcgtacaactcacgtactatccacttgctctaaagtc

SEQ ID NO: 381 - DNA, 549 bp, Unknown
  source: /note="Description of Unknown: GLuc CK dAll sequence"
gtggccacgcccgggccaccgatacttcccttcactccttcgggactgttggggaggaacacaacagggctcccctgttttcccattccttcccccttttcccaaccccaaccgccgtatctggtggcggcaagacacacgggtctttccctctaaagcacaattgtgtgtgtgtcccaggtcctcctgcgtacggtgcgggagtgctcccacccaactgttgtaagcctgtccaacgcgtcgtcctggcaagactatgacgtcgcatgttccgctgcggatgccgaccgggtaaccggttccccagtgtgtgtagtgcgatcttccaggtcctcctggttggcgttgtccagaaactgcttcaggtaagtggggtgtgcccaatccctacaaaggttgattctttcaccaccttaggaatgctccggaggtaccccagcaacagctgggatctgaccggaggctaattgtctacgggtggtgtttcctttttcttttcacacaactctacgtcgtacaactcacgtactactcactgtctctaaagtc

SEQ ID NO: 382 - DNA, 549 bp, Unknown
  source: /note="Description of Unknown: CK SZ1-L1S sequence"
gggggtggggggggcctcggccccctcaccctcttttccggtggccacgcccgggccaccgatacttcccttcactccttcgggactgttggggaggaacacaacagggctcccctgttttcccattccttcccccttttcccaaccccaaccgccgtatctggtggcggcaagacacacgggtctttccctctaaagcacaattgtgtgtgtgtcccaggtcctcctgcgtacggtgcgggagtgctcccacccaactgttgtaagcctgtccaacgcgtcgtcctggcaagactatgacgtcgcatgttccgctgcggatgccgaccgggtaaccggttccccagtgtgtgtagtgcgatcttccaggtcctcctggttggcgttgtccagaaactgcttcaggtaagtggggtgtgcccaatccctacaaaggttgaaccacccaggaatgccagggaggtaccccgcttcacagcgggatctgaccctgggctaattgtctacggtggttcttcttgcttccacttctttctactgttcgccacc

SEQ ID NO: 383 - DNA, 553 bp, Unknown
  source: /note="Description of Unknown: CK Aichi Scan (AV-S) sequence"
gggggtggggggggcctcggccccctcaccctcttttccggtggccacgcccgggccaccgatacttcccttcactccttcgggactgttggggaggaacacaacagggctcccctgttttcccattccttcccccttttcccaaccccaaccgccgtatctggtggcggcaagacacacgggtctttccctctaaagcacaattgtgtgtgtgtcccaggtcctcctgcgtacggtgcgggagtgctcccacccaactgttgtaagcctgtccaacgcgtcgtcctggcaagactatgacgtcgcatgttccgctgcggatgccgaccgggtaaccggttccccagtgtgtgtagtgcgatcttccaggtcctcctggttggcgttgtccagaaactgcttcaggtaagtggggtgtgcccaatccctacaaaggttgattctttcaccaccttaggaatgctccggaggtaccccagcaacagctgggatctgaccggaggctaattgtctacgggtggtgtttcatttccaatccttttatgtcggagtc

SEQ ID NO: 384 - DNA, 667 bp, Unknown
  source: /note="Description of Unknown: CK Aichi Loop (AV-L1) sequence"
gggggtggggggggcctcggccccctcaccctcttttccggtggccacgcccgggccaccgatacttcccttcactccttcgggactgttggggaggaacacaacagggctcccctgttttcccattccttcccccttttcccaaccccaaccgccgtatctggtggcggcaagacacacgggtctttccctctaaagcacaattgtgtgtgtgtcccaggtcctcctgcgtacggtgcgggagtgctcccacccaactgttgtaagcctgtccaacgcgtcgtcctggcaagactatgacgtcgcatgttccgctgcggatgccgaccgggtaaccggttccccagtgtgtgtagtgcgatcttccaggtcctcctggttggcgttgtccagaaactgcttcaggtaagtggggtgtgcccaatccctacaaaggttgaactgccctaggaatgccaggcaggtaccccacctccgggtgggatctgagcctgggctaattgtctacgggtagttttcctttttcttttcacacaactctactgctgacaactcactgactatccacttgctctcttgtgcctttctgctctggttcaagttccttgattgtttttgactgcttttcactgcttttcttctcacaatccttgctcagttcaaagtc

SEQ ID NO: 385 - DNA, 693 bp, Unknown
  source: /note="Description of Unknown: CK SZ1-L2 sequence"
gggggtggggggggcctcggccccctcaccctcttttccggtggccacgcccgggccaccgatacttcccttcactccttcgggactgttggggaggaacacaacagggctcccctgttttcccattccttcccccttttcccaaccccaaccgccgtatctggtggcggcaagacacacgggtctttccctctaaagcacaattgtgtgtgtgtcccaggtcctcctgcgtacggtgcgggagtgctcccacccaactgttgtaagcctgtccaacgcctgatcccccgcggaagctgctcacgtggcaactgtggggacccagacaggttatcaaaggcacccggtctttccgccttcaggagtatccctgctagtgaattctagtagggctctgcttgcgttgtccagaaactgcttcaggtaagtggggtgtgcccaatccctacaaaggttgattctttcaccaccttaggaatgctccggaggtaccccagcaacagctgggatctgaccggaggctaattgtctacgggtggtgtttcctttttcttttcacacaactctactgctgacaactcactgactatccacttgctctcttgtgcctttctgctctggttcaagttccttgattgtttttgactgcttttcactgcttttcttctcacaatccttgctcagttcaaagtc

SEQ ID NO: 386 - DNA, 671 bp, Unknown
  source: /note="Description of Unknown: CK Aichi TriLoop (AV-L2) sequence"
gggggtggggggggcctcggccccctcaccctcttttccggtggccacgcccgggccaccgatacttcccttcactccttcgggactgttggggaggaacacaacagggctcccctgttttcccattccttcccccttttcccaaccccaaccgccgtatctggtggcggcaagacacacgggtctttccctctaaagcacaattgtgtgtgtgtcccaggtcctcctgcgtacggtgcgggagtgctcccacccaactgttgtaagcctgtccaacgcatgtgcctggcaagcatatctgagaaggtgttccgctgtggctgccaacctggtgacaggtgccccagtgtgcgtaaccttcttccgtctccggacggtgcgttgtccagaaactgcttcaggtaagtggggtgtgcccaatccctacaaaggttgattctttcaccaccttaggaatgctccggaggtaccccagcaacagctgggatctgaccggaggctaattgtctacgggtggtgtttcctttttcttttcacacaactctactgctgacaactcactgactatccacttgctctcttgtgcctttctgctctggttcaagttccttgattgtttttgactgcttttcactgcttttcttctcacaatccttgctcagttcaaagtc

SEQ ID NO: 387 - DNA, 523 bp, Artificial Sequence
  source: /note="Description of Artificial Sequence: Synthetic polynucleotide"
gggggtggggggggcctcggccccctcaccctcttttccggtggccacgcccgggccaccgatacttcccttcactccttcgggactgttggggaggaacacaacagggctcccctgttttcccattccttcccccttttcccaaccccaaccgccgtatctggtggcggcaagacacacgggtctttccctctaaagcacaattgtgtgtgtgtcccaggtcctcctgcgtacggtgcgggagtgctcccacccaactgttgtaagcctgtccaacgcgtcgtcctggcaagactatgacgtcgcatgttccgctgcggatgccgaccgggtaaccggttccccagtgtgtgtagtgcgatcttccaggtcctcctggttggcgttgtccagaaactgcttcaggtaagtggggtgtgcccaatccctacaaaggttgattctttcaccaccttaggaatgctccggaggtaccccagcaacagctgggatctgaccggaggctaattgtctacgggtggtg

SEQ ID NO: 388 - DNA, 592 bp, Artificial Sequence
  source: /note="Description of Artificial Sequence: Synthetic polynucleotide"
gggggtggggggggcctcggccccctcaccctcttttccggtggccacgcccgggccaccgatacttcccttcactccttcgggactgttggggaggaacacaacagggctcccctgttttcccattccttcccccttttcccaaccccaaccgccgtatctggtggcggcaagacacacgggtctttccctctaaagcacaattgtgtgtgtgtcccaggtcctcctgcgtacggtgcgggagtgctcccacccaactgttgtaagcctgtccaacgcgtcgtcctggcaagactatgacgtcgcatgttccgctgcggatgccgaccgggtaaccggttccccagtgtgtgtagtgcgatcttccaggtcctcctggttggcgttgtccagaaactgcttcaggtaagtggggtgtgcccaatccctacaaaggttgatttcctttttcttttcacacaactctactgctgacaactcactgactatccacttgctctcttgtgcctttctgctctggttcaagttccttgattgtttttgactgcttttcactgcttttcttctcacaatccttgctcagttcaaagtc

SEQ ID NO: 389 - DNA, 572 bp, Artificial Sequence
  source: /note="Description of Artificial Sequence: Synthetic polynucleotide"
gggggtggggggggcctcggccccctcaccctcttttccggtggccacgcccgggccaccgatacttcccttcactccttcgggactgttggggaggaacacaacagggctcccctgttttcccattccttcccccttttcccaaccccaaccgccgtatctggtggcggcaagacacacgggtctttccctctaaagcacaattgtgtgtgtgtcccaggtcctcctgcgtacggtgcgggagtgctcccacccaactgttgtaagcctgtccaacgcgcgttgtccagaaactgcttcaggtaagtggggtgtgcccaatccctacaaaggttgattctttcaccaccttaggaatgctccggaggtaccccagcaacagctgggatctgaccggaggctaattgtctacgggtggtgtttcctttttcttttcacacaactctactgctgacaactcactgactatccacttgctctcttgtgcctttctgctctggttcaagttccttgattgtttttgactgcttttcactgcttttcttctcacaatccttgctcagttcaaagtc

SEQ ID NO: 390 - DNA, 167 bp, Artificial Sequence
  source: /note="Description of Artificial Sequence: Synthetic polynucleotide"
ccctgcagccgtcaccgtaagtttgaagttaccgcatatcagcctctgcttcccagcgcgtccaattcctgttcttattgtttcccctccaggcgttacgcgtgacgacgaactgtgtcgcagctaccacattattccggagccttcattctcgcggctctgatcgt

SEQ ID NO: 391 - DNA, 43 bp, Artificial Sequence
  source: /note="Description of Artificial Sequence: Synthetic oligonucleotide"
ggagaccgcggccacgccgagtaggatcgagggtacagtctcc

SEQ ID NO: 392 - DNA, 167 bp, Artificial Sequence
  source: /note="Description of Artificial Sequence: Synthetic polynucleotide"
gacaccaggatcactcttgctctgacccgccctgtgtagaatagactcatgcttccctaagacctggatttcttcccaggcactttcacccgcctgccctgctccttcagtggactgcacccagggaggcggtctctgactgtcctttactttctattctggattgc

SEQ ID NO: 393 - DNA, 30 bp, Artificial Sequence
  source: /note="Description of Artificial Sequence: Synthetic oligonucleotide"
aaacccccctaagccgccgccgccgccacc

SEQ ID NO: 394 - DNA, 18 bp, Artificial Sequence
  source: /note="Description of Artificial Sequence: Synthetic oligonucleotide"
cccccccaacccgtcacg

SEQ ID NO: 395 - DNA, 6 bp, Artificial Sequence
  source: /note="Description of Artificial Sequence: Synthetic oligonucleotide"
gtcacg

SEQ ID NO: 396 - DNA, 141 bp, Artificial Sequence
  source: /note="Description of Artificial Sequence: Synthetic polynucleotide"
tctgcgcactcgtaatcagtactaacccccctttgtcggacactatgcgataatcgatccgcctttttcaccgccttcggaattttatttacctcaactgatcctggagtctctcttggttttcacggaggcctccgccca

SEQ ID NO: 397 - DNA, 43 bp, Artificial Sequence; identical to SEQ ID NO: 391
  source: /note="Description of Artificial Sequence: Synthetic oligonucleotide"

SEQ ID NO: 398 - DNA, 141 bp, Artificial Sequence
  source: /note="Description of Artificial Sequence: Synthetic polynucleotide"
ccccttgaaacccccgccccaggttcagtctctcttcatccctctgtcctgcatggtgatacaaagaccctttgtggaccctaagccatgtagttgctgctccctccttccagttgtgaatattggtttctgttaatcaca

SEQ ID NO: 399 - DNA, 30 bp, Artificial Sequence; identical to SEQ ID NO: 393
  source: /note="Description of Artificial Sequence: Synthetic oligonucleotide"

SEQ ID NO: 400 - DNA, 18 bp, Artificial Sequence
  source: /note="Description of Artificial Sequence: Synthetic oligonucleotide"
cccccccaacccgtcacg

SEQ ID NO: 401 - DNA, 6 bp, Artificial Sequence
  source: /note="Description of Artificial Sequence: Synthetic oligonucleotide"
gtcacg

SEQ ID NO: 402 - DNA, 6 bp, Artificial Sequence
  source: /note="Description of Artificial Sequence: Synthetic oligonucleotide"
gtcacg

SEQ ID NO: 403 - DNA, 43 bp, Artificial Sequence
  source: /note="Description of Artificial Sequence: Synthetic oligonucleotide"
aataagagagaaaagaagagtaagaagaaatataagagccacc

SEQ ID NO: 404 - DNA, 49 bp, Artificial Sequence
  source: /note="Description of Artificial Sequence: Synthetic oligonucleotide"
cgaactagtattcttctggtccccacagactcagagagaacccgccacc

SEQ ID NO: 405 - DNA, 7 bp, Artificial Sequence
  source: /note="Description of Artificial Sequence: Synthetic oligonucleotide"
agccacc

SEQ ID NO: 406 - DNA, 14 bp, Artificial Sequence
  source: /note="Description of Artificial Sequence: Synthetic oligonucleotide"
tgatagctaactag

SEQ ID NO: 407 - DNA, 14 bp, Artificial Sequence
  source: /note="Description of Artificial Sequence: Synthetic oligonucleotide"
tagtagctaactag

SEQ ID NO: 408 - DNA, 14 bp, Artificial Sequence
  source: /note="Description of Artificial Sequence: Synthetic oligonucleotide"
tgatgactgagtga

SEQ ID NO: 409 - DNA, 14 bp, Artificial Sequence
  source: /note="Description of Artificial Sequence: Synthetic oligonucleotide"
tagtagctaggtag

SEQ ID NO: 410 - DNA, 3 bp, Artificial Sequence
  source: /note="Description of Artificial Sequence: Synthetic oligonucleotide"
taa

SEQ ID NO: 411 - DNA, 14 bp, Artificial Sequence
  source: /note="Description of Artificial Sequence: Synthetic oligonucleotide"
taatagctaactag

SEQ ID NO: 412 - DNA, 15 bp, Artificial Sequence
  source: /note="Description of Artificial Sequence: Synthetic oligonucleotide"
taactagctaactag

SEQ ID NO: 413 - DNA, 579 bp, Rhopalosiphum padi virus
gataaaagaacctataatcccttcgcacaccgcgtcacaccgcgctatatgctgctcattaggaattacggctccttttttgtggatacaatctcttgtatacgatatacttattgttaatttcattgacctttacgcaatcctgcgtaaatgctggtatagggtgtacttcggatttccgagcctatattggttttgaaaggacctttaagtccctactatactacattgtactagcgtaggccacgtaggcccgtaagatattataactattttattatattttattcaccccccacattaatcccagttaaagctttataactataagtaagccgtgccgaaacgttaatcggtcgctagttgcgtaacaactgttagtttaattttccaaaatttatttttcacaatttttagttaagattttagcttgccttaagcagtctttatatcttctgtatattattttaaagtttataggagcaaagttcgctttactcgcaatagctattttatttattttaggaatattatcacctcgtaattatttaattataacattagctttatctatttata

SEQ ID NO: 414 - DNA, 675 bp, Artificial Sequence
  source: /note="Description of Artificial Sequence: Synthetic polynucleotide"
cttgattctaaccttgccgtatggtgccctaacgggttcatttaatcatgcgatgagggttgctataccgcatccattctaaggcgattcaatgcttcatttaggaattttgttgacgattaaaaggtacccccacaaaaacaaaaccaatcttacttgattttcgttttaactgaccactgcgatcccaaattttcgccttcttatcaaagtatgttgtgttctttgggtgtacaacctgagaacttgtctacaactacatattactcgaggaagaaattcggtttaagccgtgccttctcacgtttagtatatctatctggacacaccttcttcatcttctaatccccatctagtctcctgatcagagacgtcgttattaacaaataaccccccttgttaataagagacaaagtacaatcaagctaagttctcttggagttcctgtaggaacttagccattgtgatagagtcataagtctatgtgcatagacagctctagctcaccatttccttcccaacccatcttttcatcagcttaactctatgaatccgatgcaaaaaccattctaacatcttatggtgctttccaagccaaatgagagctcactcttttgagccgctatttaatggacaataaacgttttatagtgtacatcatattgtaaaaacaaa

SEQ ID NO: 415 - DNA, 636 bp, Oscivirus sp.
cctcggtccctctttccgtcgccgcccacgacgttaaatgcggtgttgtggtgcttaggtgccacaccactgctatttgggtccccctttcccctatatatgtttgtttgtttatttcaatttcttgaggattggcacctccttatgccaaatctaaatcgtggaggatcccaggctttctggtctttaacagaactccacgtccaggtcatagaaactggttggtaggctgcctgagtagtccatttgctagtagtcccttgtgaacagggtggctcccgtttactgctggtattcccggtgtaggtcgccatggtggtaacaccatcctgcattgtgtgtgaaccagtaccgcaaggatagcaaggtatgaacacttgtggacgaaatggtaagtgatcaattcactttcatggccggaaggtcacgtggcaatcatgccacccaggtaccctcctctgggaggatctgagggtgggctaagcagaccctgccatgtggctgaacttttcccttattgttttactttgtaacatttatagttgtgttagtgatttgtgtgttgtgcccttgtgagctatatccagtataagttcgcagctagaagttaatccttcgacatcggctgtattggaa

SEQ ID NO: 416 - DNA, 675 bp, Cadicivirus B
caccaacccttgacctgtaatgtcagtggacagagtgctcctctgttcccggttaccgtgttccaggacacgattgtaatcctgcgcctcaccagcgctgcgtgcacgtctgcataaggaaacgtgccttccccatgtctctatcaattctttggtgagtgaccgccctagttgctcatcctatgggattcttctctcatgggttctttgtggcatgcgaatgtcaccttaattggaggtctttaattagatatcctttcttcatctttgatatgagtgtcggaatttgattcctagtctctgcaaaacaaccccacttgatgaattcaacttttcaaccgcacaaacataatcaggtttttaaattgaatgtttctaaattctaaatttagtttatttaagtagtttgccatcttgactcgatgtaaaattgtcatacaagtcttcttttcttttctttacactttgaagtttgcacttagcagtcgttctgcacagctttcgagttttgtttgatcgacatcgcaacttccacccacctctctttttctagtgttgaatgcggctaatcctaacccgagagcaataaacccaggtttattgtcgtaacgcgcaagtcttggacggaaccgactatacacacacctctttaccctttagtacacccttggtacg

SEQ ID NO: 417 - DNA, 570 bp, Artificial Sequence
  source: /note="Description of Artificial Sequence: Synthetic polynucleotide"
gcaaaatgggtacgtagttaaccactgcgtatcaggattgcaggccacgaagggtatttgcatatctttctatgcggtattacggcttaaaacccgttgtatcttgttgtttgactgcctgtatcactagtggccattttatttaggttagagacccctgatagtaggagagttacaaactctttaaaaattgttgaccccggaaaagatggtgacccctgtaagtagttgatcaagaagatctatgcgctggcatagtaatccagtgtttcctgttttaggatgacctctgaaagtagatgaccgtggaaagtcacgtagtgccccaataagcacgtttgggcagcgtgcgctatcacaaggcttgatctccgaggagccccttgttttagctggctggaagccaatgatcttaagtagataagtgctgttgcttgtagttcaacagaaagctttgagtacgtctttcttgcgagaaagaacacatgcattcttatgctctcaattctattatttttattttgggcgaaaggaaagctctcacgcgagtacgaatagccaaccctttat

SEQ ID NO: 418 - DNA, 145 bp, Plautia stali intestine virus
gctgactatgtgatcttattaaaattaggttaaatttcgaggttaaaaatagttttaatattgctatagtcttagaggtcttgtatatttatacttaccacacaagatggaccggagcagccctccaatatctagtgtaccctcg

SEQ ID NO: 419 - DNA, 312 bp, Unknown
  source: /note="Description of Unknown: PV Mahoney sequence"
atgagtctggacatccctcaccggtgacggtggtccaggctgcgttggcggcctacctatggctaacgccatgggacgctagttgtgaacaaggtgtgaagagcctattgagctacataagaatcctccggcccctgaatgcggctaatcccaacctcggagcaggtggtcacaaaccagtgattggcctgtcgtaacgcgcaagtccgtggcggaaccgactactttgggtgtccgtgtttccttttattttattgtggctgcttatggtgacaatcacagattgttatcataaagcgaattggattggcc

SEQ ID NO: 420 - DNA, 577 bp, Reticuloendotheliosis virus
ggggtcgccgtcctacacattgttgtgacgtgcggcccagattcgaatctgtaataaaagctttttcttctatatcctcagattggcagtgagaggagattttgttcgtggtgttggctggcctactgggtggggtagggatccggactgaatccgtagtatttcggtacaacatttgggggctcgtccgggattcctccccatcggcagaggtgcctactgtttcttcgaactccggcgccggtaagtaagtacttgattttggtacctcgcgagggtttgggaggatcggagtggcgggacgctgccgggaagctccacctccgctcagcaggggacgccctggtctgagctctgtggtatctgattgttgttgaaccgtctctaagacggtgatactataagtcgtggtttgtgtgtttgtttgttaccttgtgtttgttcgtcacttgtcgacagcgccctgcgaattggtgtacccacaccgcgcggcttgcgaataatactttggagagtcttttgcctccagtgtcttccgtttgtactcgtcctcctctccctctccggccgggatggg

SEQ ID NO: 421 - DNA, 675 bp, Tropivirus A
tgtcgcatgttgccaacatcaaaattctgggagagtcgcgaactccttaacactgccttgcctcgacggagccgttgttatagtgtcgacgggatacaaacattaaactaaacccacttgcctcgacggaaccccttaccttttattttattttatagtatgaaagtgaatcttgtatgaatgttcatagaaaactgcaaatgagtaccacgtctaacatgagagaatgatactggagaaatccaagtttagaagtcactacgaatcccagcggaaacaagggaattctgagcttctaataggcgtttaagactatttgcaaaattctggtgcgtaagtgatattttcattgcgtagaacgctggtaaccactccggctagtataagcattgttagtcacttattatgaaactccacactatcctttctggagaagcacacaaacttacatggtaaagctagaccattatcttaagcggtgagtacactgcaaccttgtaacaatgcttgtatgactactttttgtatatcttgagcaatattgttgaggtggacatgtccaaaggtaatgttgttgggaatggaggggtccattttcccgtgcacgtagtgtactagtattgggtgatagccttgcggcggatcaaccatgtattttaatccgttgactttcac

SEQ ID NO: 422 - DNA, 592 bp, Symapivirus A
ttgggaaatccccaatgcttctttcaacaccgcctgactatgcggtggcgcttcggctcaaacaactagtcacttccccctcttaactactacccaagacttctaactacccttacctacttatttgtctaaatttcaaacttttattctcacgcgtcttataaacatcttttctatttgttatggtatgttttgtgatttgtgtggtgtatttcatttaatgggatctagtggaccgtgccccggttgggtatccgctccctttaaatgtttgcaagcactcttgacattataacctatcatttagtttacttgtttgtatgatcgtatttctgaatcgtaacatttatgcaattctttctcgccgagacttgtctaggagataaagttcctgcatatttagtgttacggttgtataatggagacttagatagcttcacactgaggacgctttttcgctatccttttgacctgattcaggccagtgtggagttaatgattgtatggatgggccctacaatttgtctaagacttggtgatagcctcgcggccgctcgccatttatacaactgaatagcggttgaaactctct

SEQ ID NO: 423 - DNA, 591 bp, Artificial Sequence
  source: /note="Description of Artificial Sequence: Synthetic polynucleotide"
tcacgcgcttttccggtggtcacccaccgttagggagcgccagcgttcgcgcttccgctaccaggtgacacactcctttcccctcccccattcccgttcccatcctctggactggtttctcctcacgattgaccagcagctgggagctgttaccagacgttggacagtaagtcccggatgcactatagggctggtggctagtgcttggtaagcactcaacgccatacctaatgtgtacctcggcttgccctcctggtcgtggtgaccggctgtttctcttcccttggctccagacgggctggtgtcctaccaccaccgttgcatgcagacctccccctgcgcactcgaacgccctgtcccagcagggttagtatgtgctgtgcagatctgcatgtgacaccccatccactggtagagcaggaagttgccctagctaacgcggcaagtattactttccgctacacgtccttgagattcctcggacctctggaactagggtgactgtgggcttgggaaaacccaccttggtcctgtactgcctgatagggtcgcggctggccgaccagtggatgtagccagttgttttgggat

SEQ ID NO: 424 - DNA, 538 bp, Rosavirus C
cagggagatctccatgaataatcttttccaccctctttagcgtctatgctattgaggacgggttggagccccgttgacccagcgtcagagtgtgtcggtagcaggctttctgctctcgccccatgccggccacacctcccattagtgatgtgaaggttgtaagttacatgtgaaaaggtttctaataattgagctgaatgtagcgattacctaaggtgagcggattcccccacgtggtaacacgtgcctctcaggccaaaagccaaggtgttaaaagcaccccttaggtaggccactaccccgtggcctcagttctcttagaagattcacttagtagtgtgtgcactggcaactcttaagcagagctagtgagtgggctaaggatgccctgaaggtacccgcaggtaacgttaagacactgtggatctgatcaggggctcgagtgctgaagctttacagaggtagctcgagttaaaaaacgtctatgcccctcccccacgggagtgggggttcccccacaccaattttagattgcact

SEQ ID NO: 425 - DNA, 675 bp, Rosavirus sp.
ccaggcatggcgttaaacatgcattcccttcccctagtaacctcccttcgccccttccccacgttgtaccccctccgagatggctgctaaggcgcttgctgctacagcagtctcgtgtttcgggtgttataagtgctttcttttccactccactccctgcctatggggagcggaacggccttgtctcggtcgttgcttcttgcagatcttcacccctccaggctttctggactcgccaggggtggagtagtaggcgcactgtctaagtgaaggtagcagtgttgttggcgaagagttgtggacctactttgagtttgtagcgatcatccagagctagcggatctccccacgcggtaacgcgtgcctctaggcccaaaaggcacggtgttcacagcaccctttggatggcgggggtgcccccctccgcacttaaagtagaaaaacagcttagtagtcaaataacatggctttcctcaagcattcagtgctacatgggactgaaggatgcccagaaggtacccgcaggcaacgataagctcactgtggatctgatctggggccctgggccaggtgctatacacctggttaaaaccaaatctggtagtcagggttaaaaaacgtctaagtcccacccccccggggacggggggttcccttaaaccctcaactgacacc

SEQ ID NO: 426 - DNA, 656 bp, Unknown
  source: /note="Description of Unknown: Rhimavirus A sequence"
cgaattccggacatctcctttcgggggcgagcgtcaccgtgcccctcatggaggcaactgtgcctctaatcggtgacccactgagaaaattttctttctacgtggctaaacaatgcaactttataataacacaaatttaatgcttaatcttaacaccaaagatttgaacatatgtttggaaagtggcacacttcaaacattgcatagttgctaggggtgaagtccctttaaggggttgcagaggatctttcctctttatgagcggctaggagtatcttcttgatattatgtggtcgtgcaactcacttcccagatgtatgacggtgtactaagcgattggaactagtcataacctctttgaattttggtattgcgagtctagcagggggatatttaccgctaaagggtgacacactcgtgagggtggcctttggtgtgtgtatatttattccgcccatcttgcatggggtgctaaaattctaatgctgtgaaataaccattttctgaatacattctctacatttggagtcaaatatgaggaatgccactcaggtacccttgacatgatcttggatctgagagtgggctaattatctaattatttggcgactttctaaaatcttctgtttttagtggtgacaatttatggttataaa

SEQ ID NO: 427 - DNA, 487 bp, Rafivirus sp.
gtgtccgggaagcgactcaagcttttgactgagtctctacaccttcatccgtaacatctttaagtttatgtgcctatggacctctagtgcactgccatcaccgggggtgtattggactggtttttccacaatccattcatcctgaggaattttggctttgttactaggatggtcccaccacacgcttatctgtgcctattgtgtcaaccatgttcttaagtagttgtgcccgtgggtgagtagataaccacaacaatccgataaagcatctcgcaaggatgtgagtaatggagtgtatgtgctacagagacccacaacctgaaccaagagagacacagtgaggattgtaaagggggaactctttgaaagggcatgtcccgcaattcctactgactgacaccgggggttggtgtcggtggattttagcaaatcctgttactgggtgatagccttgtgcacttcacttggttcttgtataagtgctgta

SEQ ID NO: 428 - DNA, 560 bp, Rafivirus sp.
tgcgaatttattcgcacagtctcttttcccccatcttgtgtgtgtgatggggtaagccgcagagtaatacctactctgctgcaaacacactcactcttttctatctactttatatcatgtaataataagtagggaacatattcaattcatattgttcatctcactgaacccgcatgaaggactgcattgcatatcctggacgaagtgacgtggaatatttggacatttatggattggacaccattacgctttgtgcctctacggagatgtaaccataatcttaagtagtagtaccccagcacaagaggataaagtggcatacacgacaacgggtgttgctcgcaccttagtaatgtggatgttcacccttggagcgtgctgaaactctgtgggtaaagacacacattagtacaaatgtgggggaactcactgaaagggcatgtcccgtgtactggtgtgccggaaagtgggggtcgctttctggagaacttagtagttcttgttattgggtgatagccttgcggcggatcaactcacagttttaatccgttgttttgcat

SEQ ID NO: 429 - DNA, 675 bp, Poecivirus sp.
actacacaatcgcaacacgcgcaagtttgtagtttgattggcgtgcaaatgtcaaatcaagcatataacacaatttggtggctgttggtgtttgttataggaattttggttgtgttgaaattgtggatgtgtaggaaatatgcacaattacgtcagcgtcaggagttttataacctggcgcaacaccaaaatggtcttcgcgctttaacatcaccagcgaggtgtaaacaaattgaagttgaattagatcgtgtataggccagggaaccatccctcccaacgccacatcttgtggggaagttgggataatggtgggtctatatgaattggtctgtagacccacagtgaagagtgaatagtatgcttgcggttccatttgttaatggtctagcatgggtgggggcggcaaccccgtgaggggttccccactggccaaaagcccaggggttagtcatttcaaccaaggaagctggtaacctggtgacctgaacttgagtggtgagacccccttgctagagtgtgtaaaccgattgtaagcattttgtttgcttagtatctgtggtataagcagtcaattttgtataggctcaaggctgtggtagttagtagatgcccggaaggttattactgatccggggaccgtgactatacattaggtaaaccggtttaaaaacc

SEQ ID NO: 430 - DNA, 519 bp, Unknown
  source: /note="Description of Unknown: Megirivirus A LY sequence"
ttcgggacactggatgggcgacttggtggggctgccactctatcttgacctttcgttactgactttcggatctctgactcctccttgtctcttgcgtttggtccacggacggactaattggaatgtttactggctaagcctcgttctgaaataccctagccaatgggttgtagtaggatcctggtgtttccattaaacctcttccgaccatagtagctagagttatggctgtgtaggatgtgggtaagaccgctttttgcgtatctcccacaagacaccggattatggatgtgtccgctggataaggctcgaaacctcccaactgaaggtggtgctgaaatattgcaagcctaggttgtgtagaggcaagtagatgcctgccgcgacattcgtcttccgcccttttgggttagtagtgtacctacatggacgtggggctgggaatccccaccttgcataacactggttgatagacctgcggctggtcaagttactatggtataaccagttgaaatggct

SEQ ID NO: 431 - DNA, 675 bp, Unknown
  source: /note="Description of Unknown: Megirivirus E sequence"
gcttggcaacctcatatcgttactctgccgaccagtctgggtcgtgtggccacacaatgggattcgttctgttgtgtagagtcacatggcattactgggctgatcggtggggatccgttgccacccctaaacccttacatttactggactgcttttcttggccccggaatgattcgctcacccgcgatgaggactgttgttcttattatggcaggattacgcgtctggtccgcgtaaggactaattcctatgtttatacgttactaccttgttctgaacggtgggcgccaccccgcctagtaggatcctggcttatcgtgtagacctctagggaccacattagctagagtgtaggctgctatggatggagtagtgacccctttttgggtatcactctctaagactccggaatgtgtcatagtacgctggaaatccttacttgtttttccatgagggggaggtggtgctgaaatattgcaagccacccctcggttaaaacagtttggtgccgcttatgccatattaccgccccttgtagttgggctgtttttgcagctccgggttagtagagtaccatagtggacgcggtgttgggaatcaccgccttggctgcacactgcttgatagagctgcggctggtcaagctaattgtggtataaccagttgatttggcat

SEQ ID NO: 432 - DNA, 639 bp, Unknown
  source: /note="Description of Unknown: Megirivirus C sequence"
ttcccgaccggtctggcaaaccggacggttatcctggttagatgtctgatggttgctggaacgtggtggctactgctgccaccttctggcttcctttaatgggcatctagctgggttctttgccacaatccatcttactctcttacccattttctattacccagacttgttgttaactggtaaagttgacctactggcttcgttttgagactattctggtgttggtggacactctttccacaagtagattgtatggagttcatgctcgttttgaaccgggaatggcacaacccgtagtaggatcttgcctctgccatactaatctgcgcctgttgcttttagactatgggctgctaaggatgacattggaacccctttttggatattccatgtcaagtcaactgtttcatctggtgtacgctggaaatccttgttccgaggtcttgtctggaggtggtgctgaaatattgcaagccacaggcagttccttggacttggtgccgctatcagatgctacaccctctatgggcaaatgttgaaccttagtggacgcgtgagatgggaatccacgccggccatagactggctgataagctcgcggctgatcgagttgcaacagtaatcagttgatttgccact

SEQ ID NO: 433 - DNA, 497 bp, Ludopivirus sp.
tagacccccacctagcccttttccccgtcagtggggggcttactcactgggcatctgttaatctggcctaactagattgacaccactcccttggaacgtaactccacgctaactcactggctctacgcacagacacacggtctttctgctatccccggggaagataccagatggcgaccggctgtcccagcggcctagtagctactcgggttgagtacccaccacggttttgacgcctgctaaaattcaagagacagaggtaggggtgcttagtgtgtgggggaagttcccacaagcgaggcaaagcattgctccctcgcgtcaccgggtgcaaggtaaattggctggacttccgctctacccttgctactcgccctcttcggagggttcgaagtgacactaggtatacgcatggttgggaaaccatgcctggcctactactgggtgatagcctggcggcgggtccgtctcttggcttatacccgttgatttgggat

SEQ ID NO: 434 - DNA, 610 bp, Livupivirus sp.
tatctacatggggatccaggctgtatggaatgtctgtcttaacaagcactataccagaaagatccacccaaagtggtgggactgggactgtgaggtgagaaatcccgaaaccagccttctcaagcgtcggacgatctttctgttttagtgaacaccttgccttttaaatggatgacaacaccccttcagcaaatcgcaatctgaaatcccaaaagactgtttagccgaactctggtaatcactccggagaagtaggatacgcagcccctgtggactcttgatttcaggactcaaggtagctagagctggaacttcatggaatgacaaaggaatatatgcacattgtgcgctttcctggccttgtagcccgtcgtgaggatatgtcgttgggaatcgacatcttagtccagtactgcttgatagagtgtcggctggcacagttacctgagaataagtcagttgtacttaacatgaacaaaaaaaataactaccacaactaccacaatctaccaatacttgaattatgctgaatctcgtacagtaaaaacgttccgtggaaggacaagtattgaagtgcggttacatcatccgatacgcgctggatccctca

SEQ ID NO: 435 - DNA, 629 bp, Aichivirus A
cacccatacacccccacccccttttctgtaactcaagtatgtgtgctcgtaatcttgactcccacggaatggatcgatccgctggagaacaaactgctagatccacatcctccctccccttgggaggacctcggtcctcccacatcctccctccagcctgacgtatcacaggctgtgtgaagcccccgcgaaagctgctcacgtggcaattgtgggtccccccttcatcaagacaccaggtctttcctccttaaggctagccccgatgtgtgaattcacattgggcaactagtggtgtcactgtgcgctcccaatctcggccgcggagtgctgttccccaagccaaacccctggcccttcactatgtgcctggcaagcatatctgagaaggtgttccgctgtggctgccagcctggtaacaggtgccccagtgtgcgtaaccttcttccgtctccggacggtagtgattggttaagatttggtgtaaggttcatgtgccaacgccctgtgcgggatgaaacctctactgccctaggaatgccaggcaggtaccccaccttcgggtgggatctgagcctgggctaattgtctacgggtagtttcatttccaattcttttatgctggagtc

SEQ ID NO: 436 - DNA, 675 bp, Aichivirus sp.
tactccattcagcttcttcggaacctgttcggaggaattaaacgggcacccatactcccccccaccccccttttgtaactaagtatgtgtgctcgtgaccttgactcccacggaacggaccgatccgttggtgaacaaacagctaggtccacatcctcctttcccctgggagggtccccgccctcccacatcccccccccagcctgacgtgtcacaggctgtgtgaagcccccgcgaaagctgctcacgtggcaattgtgggtccccccttcatcaagacaccaggtctttcctccttaaggctagccccggcgtgtgaactcacgttgggcaactagtggtgtcactgtgcgctcccaatctcggccgcggagtgctgttccccaagccaaacccctggcccttcactatgtgcctggcaagcacacctgagaaggtgttccgctgtggctgccagcctggtaacaggtgccccagtgtgcgtaaccttcttccgtcttcggacggtggtgattggttaagatttggtgtaaggttcatgtgccaacgccctgtgcgggatgaaacctctactgccctaggaatgccaggcaggtaccccaccttcgggtgggatctgagcctgggctaattgtctacgggtggtttcatttccaattctttcatgtcggagtc

SEQ ID NO: 437 - DNA, 675 bp, Aichivirus sp.
tactccattcagcttcttcggaacctgttcggaggaattaaacgggcacccatacacccccacccccttttctgcaacttaagtatgtgtgctcgtaatcttgactcccacggaacggatcgatccgctggagaacaaactgctagatccacatcctcccttcccctgggaggaccccggtcctcccacatcctccccccagcctgacgtaacacaggctgtgtgaagtccccgcgaaagctgctcacgtggcaattgtgggtccccccttcaccaagacaccaggtctttcctccttaaggctagccccgatgtgtgaattcacattgggcaactagtggtgtcactgtgcgctcccaatctcggccgcggagtgctgttccccaagccaaacccctggcccttcactatgtgcctggcaagcatatctgagaaggtgttccgctgtggctgccagcctggtaacaggtgccccagtgtgcgtaaccttcttccgtctccggacggtagtgattggttaagatttggtgtaaggttcatgtgccaacgccctgtgcgggatgaaacctctactgccctaggaatgccaggcaggtaccccaccttcgggtgggatctgagcctgggctaattgtctacgggtagtttcatttccaattcttttatgtcggagtc

SEQ ID NO: 438 - DNA, 610 bp, Kobuvirus sp.
gtaacttcaagtgtgtgtgctcgtaatcttgactcctgccggaatgccgcccggttcagtgaacaaacagctaggcaagtccctcccttcccctgtggtcggttctcaccggccaccatccctcccccagcctgacgtgttacaggctgtgcaaagcccccgcgaaagctgctcacgtggcaattgtgggtcccccctttgtcaagacaccgagtctttctcccttaaggctagcccggtcccacgaacgtggaactggcaactagtggtgtcactacacgcctccgacctcggacgcggagtgctgttccccaagctgtaaccctgacccaagactgtgctgcctggcaagcaccgtctgggaagatgttccgctgtggctgccaaacctggtaacaggtgccccagtgtgtgtagtcttcctccagtctccggactggcagtcttgtgtaaagatgcagtgtaaggttcaagtgccaaatccctggaaggagtgaccctctactgccctaggaatgctgtgcaggtacccccaacttcggttggggatctgagcacaggctaattgtctacgggtagtttcatttcccatcctctcttttttggcatc

SEQ ID NO: 439 - DNA, 576 bp, Kobuvirus sp.
tttgaaaagggggtgggggggcctcggccccctcaccctcttttccggtggccacccgcccgggccaccgttactccactccactccttcgggactggtttggaggaacataacagggcttcccatccctgtttacccttactccactcacccctccccttgaccaaccctatccacaccccactgactgactcctttggatcttgacctcggaatgcctacttgacctcccacttgcctctcccttttcggattgccggtggtgcctggcggaaaaagcacaagtgtgttgttggctaccaaactcctacccgacaaaggtgcgtgtccgcgtgctgagtaatgggataggagatgccaataacaggctcgcccatgagtagagcatggactgcggtgcatgtgacttcggtcaccaggggcatagcattgctcacccctgaatcaagtcatcgagatttctctgacctctgaagtgcactgtggttgcgtggctgggaatccacgcttgaccatgtactgcttgatagagtcgcggctggccgactcatgggttaaagtcagttgacaagacac

SEQ ID NO: 440 - DNA, 513 bp, Kobuvirus sp.
ccaccgttacttcactccactccctcgggactggtttggaggagcataacagggcttcccatccctgttcaccctcaataccacccaccctttccctcaaccatccctatccacaccccactgactgattcccttggattttgacctcagaacgcctacttgacctcccacttgcctttcccttctcggattgccggtggtgcctggcggaaaaagcacaagtgtgttgcaggctaccaaactcctacccgacaaaggtacgtgtccgcgtgctgagtaatgggataggagatgcctacaacaggctcgcccatgagtagagcatggactgcggtgcatgtgacttcggtcaccacgggcatagcattgctcacccgtgaatcaagtcattgagattcctctgacctctgaagtgcactgtggttgcgtggctgggaatccacgcttgaccatgtactgcttgatagagtcgcggctggccgactcatgggttaaagtcagttgataagacac

SEQ ID NO: 441 - DNA, 675 bp, Kobuvirus sp.
gggggtggggggggcctcggccccctcaccctcttttccggtggccacgcccgggccaccgatacttcccttcactccttcgggactgttggggaggaacacaacagggctcccctgttttcccattccttcccccttttcccaaccccaaccgccgtatctggtggcggcaagacacacgggtctttccctctaaagcacaattgtgtgtgtgtcccaggtcctcctgcgtacggtgcgggagtgctcccacccaactgttgtaagcctgtccaacgcgtcgtcctggcaagactatgacgtcgcatgttccgctgcggatgccgaccgggtaaccggttccccagtgtgtgtagtgcgatcttccaggtcctcctggttggcgttgtccagaaactgcttcaggtaagtggggtgtgcccaatccctacaaaggttgattctttcaccaccttaggaatgctccggaggtaccccagcaacagctgggatctgaccggaggctaattgtctacgggtggtgtttcctttttcttttcacacaactctactgctgacaactcactgactatccacttgctctcttgtgcctttctgctctggttcaagttccttgattgtttttgactgcttttcactgcttttcttctcacaatccttgctcagttcaaagtc

SEQ ID NO: 442 - DNA, 675 bp, Kobuvirus sp.
gggctataaatatgggcattcctcttcccccttccccttttgaagatgagtgcgcatattcttgactccgcctggattggccgcccaaggcgtgaacaagcagctaggccaccatgacactgcggtggtgtccgaacccgcgggtgccttcacgggcacctgtggtatgtaggactcccaccgtggtcttccctttccccctcaatctttccccctggttcgactaacgggaccagtgctggaacctgtccggtgaacggtatagcaggcccccccggcagaaacacccggtgcttaccccttaaggctagcccccttccatgaatttggttggggcaactagtgggtgtacagttggcgtgaaccctccggtctaggagtgctcttgcccaatcctctgtgtgtgccttgcagtagggactggcaatccttcgcgtaggtgatccgctgtgccatgccatcctggcgacaggaggcccagtgtgcgcaacctacgtcccttctgggtgctgcattgcattacctttggagtaagcttggtgtgccgaaaccccagggtttacgtaccactcgtggtgtgaggaatgtgccgcaggtaccccatccttgaggtgggatctgagcggtagctaattgtctagcaccactttcttccttttttctttgctggtcacg

SEQ ID NO: 443 - DNA, 604 bp, Aalivirus sp.
ttgaaagggggtgctcagggtagctccctgagctcttccctccaccctctttcaacgtctggcccacgatacgggccacctttcaatcttaactaactatccctttaatctatttggattttctggtttagaataatttggaacacataattggattatcttttaggattgtggataggatttgttcgggatatcactcccttcctgtgctaacacatattctaattccctcctttgtctattatctcttggaggtggtgctgaaatattgcaagccacttgagtgtatagatgaagtaggctcaagatgaatgttgtgttactcaaggcaagtgtagctatcactaagatattggtaacgtgaaacggattaccggtagtagcgtgatcttccgtcttagtgctctagtgactagaggacaacgacatggcatcacatatcttaaccctccagttttggcatccgggacagaatgggctggatatccgctttctttctggggtatgtgatgggtggtattggggtaaccaccttgaccatgacgctcgataagagtgaccgcctgatcattgaaacctctagtataaaattcaggctgaaatc

SEQ ID NO: 444 - DNA, 445 bp, Grusopivirus A
tgcctgagtaggattgtgaatttaggtatgagagggttagccaacccattctgaaccataatagatacgtcaatctgaatccatctaaatctatctcttaggcagtggtgctgaaatattgcaagctactagggatagacgtgatctgattcaagaacctatctaatgtggtgatgagaaggctaggtttatccatagtaatcccttgttctgaacaggcaatgcacatgctctagtaggatctcgggctctgcgattggctctaaaccgaccaatccaggtagaggcactaagtgtaggacttgccaaaatgtattacatgctggtaccgactcactagtctggaaactccacactgaaagtgactggggggggccccatcacatttgtgctactgcttgatagagttgcggctggtcaacttggattggtataaccagttgaa

SEQ ID NO: 445 - DNA, 537 bp, Grusopivirus B
gccatccgtaggttctggtaaggttccatcaactgttggggcgctagttgctatgaccgcattcacggacggatgatttatagtatcacccaatccgggcacaacttctttagccacttcttccacattactaagggctctcttgccgagtttcaacgtctagtccacgacacggaccttcctacttttctatcttcttattttctctactaaattggtatctggtactgaagatatgcggattgtgattttgtgcctgtctaaactaaccctattctagggttaggtgggtaccatatactaatggtgaacaggattacctatgtatccattagtccctatggatctggcgacccacaaactcatgttcatagagaggctaagctgagtgctcgccgaataagcattgcttcaggtgccgactattgtctggaaaccactcagtgatagctataggggggggccccgtagcatctgccttactgcctgatagggtggcggctggtccatgaacatgcagtaaccagttgacttgac

SEQ ID NO: 446 - DNA, 562 bp, Unknown
  source: /note="Description of Unknown: Yancheng osbecks grenadier anchovy picornavirus sequence"
ccttagggtctggaatgcgtcctttctgggcacttccacaatcctaaggtaattttcaacgccagcgatggagcgatatccaaagaacctttatgttttagttcgtcttgtatgtttataaaatataaaattgggattagcaacccacaaaaacatttttgttattctcaccacatgagagggtggttaaacctcttcgtaacctatcttgcttgattggctacttgggctagatttaggacaacctctttagcaagcctaaattactcctcgtacttgcacctggtaacaggcgtacctggaggttacggtggcgctaacttggacttctcgttaattcgtgcaagtttaaatgatgcctattttgaatacaagaaagtatgatagtaacttagggcgtgaagttccgcttaacataaggcagtataagtactaagataaggtgtaagacctaccttaataactgttgtcttttctcatggtctttccgtgggagcccttgctaggggtaaagttaagtattctcaaataatttttcattcaaactctttctctctgtttt

SEQ ID NO: 447 - DNA, 675 bp, Gallivirus sp.
ccactcgcacttcctggatagtgcgttagatatgcccgacatatcgcttccaggaccaaagccccccttttctctttcccaaccagcttcgccactcaagctgtaattccatgtccggtctttccggccttagtatcatggaaatgtggtcgtgctcaaatgaaattgagttgacattgatcaatgaaagttgcactgaactttgctaaactggctagcgccacctggtgtgtgccgttggtctcctcacatggtaacatgtgccaacgggcccgaaaggctagtgggcaattaccgctccaagggaggggtacccaccccgacctgaacagcggtaatgaagctcacctcccaggctctgaccccgagaagtttagttatttagtaggtgtaattagtacttgtgattggtcaatttgatagtagtttgaaacgttatggatgaatgagtagaccccctgaaggtaccccattacatgggatctgatcagggccacattctgcgtgtctccccgcacttgtggttaaaaccatgaaagttcatcccaaacaatcttttcctcttctttttcttttagtggtgacaacctactggattggtgattaccaatctgtactagtgttgtattaagacttgttgtgtggagaaaatggactctttcaagaagatttttg

SEQ ID NO: 448 - DNA, 673 bp, Unknown
  source: /note="Description of Unknown: Falcovirus A1 sequence"
taaaaggggacgcggtgtggcagctttggctgtcatgccgtgttctccttttaccccaaggactagccttgggggttttccaaattcctttccctgtaggctttacttctctttatctatcttttctgtaactaagttttgcctattctaaaaatattttagaatgtgtttggatgtaactaagtttgtgcctgccctaaaaatattttagggcttgtttggataacctcgtcccttgtgttcagtgccgcacaatttgctaggcactgttcacttcctttgtttgtccattatgtatgctaaggtatgaattccatcatatgcttagcctctacatgcataatcttattccctccctggtgcaaactacgcccccaacatatgtgaatcttttaagcatattcctgaccccacacatatatatgtgttctcgtgaattcccccaccgtgaggtggtcacttggacgtggtgtgtgtcacacagcatatatatgatgcaggatgttgtttttaagataagcatatgtccttagtgctttgcatcatttcctccacaccccgtgaatgcggctaatcttaaccctgttgggtccgtgggtaaaccaacccattaaccacaggacggaaccgactactttcgggagtgtgtgtttctttttcttcttttgtcact

SEQ ID NO: 449 - DNA, 665 bp, Tremovirus B
ttcaaatggcccctgggttgatacccagtggtcatttggacactttggtaaggaggtgtaattatccttcccatgtggaacctagtgcttaggtttactttatatgttctttgtttgtcctttgtactttctatcgggcaatcttgttgttcaatacaatatgtatttgaactgcctaagataaattcagttttcaaccaacccctctcttggggttgtgtctttctttctttcttatatcctcttaagctgacttacttgctaatccgactcctcgtcaacgggagggtaaagcagtatcactagggtattgtgatgtaggagaaaaagtaagtagagatagtgcatgtaacgaaagtgacttggtactttaaactctcttaatcccaaagtgtggtattggtcatgttggagtaggctacgggtgaaactccttcacatttagtaatgtgttcacacgctaacgctacggtagatgacagactaggtcttattctcaacgtagggggacgggtgtatgttcatgattagccacatattaaggttttgaggggctgagtcatataagtatgtgcattaatttctggtactggtccctggggactggcccttttctaggttgattttagtttccccaatttttaaaaactaatgagatttacgac

SEQ ID NO: 450 - DNA, 675 bp, Hepatovirus A
tctttggtctggggaactaaaataccagacccgcgtttgcctagcgatataggctttaattgttgtttgtcattgtgcgtttgatatgtgttttaatgtaaataataattctagcaggttctagttcttgatcatgtcctctttaaggcactcatttcaacttgctatctttcttttcttccttggttctccctacaccaaatgcactggccgctgcgcccggcggggtcaaccacatgattagcatgtggctgtaggtgttgaaggctgggacatgaacatcaatggaatagtgcgcatgcttactggggtccattgaagtagtgggatctttctattggggtaggctacgggtgaaaccccttaggttaatactcatattgagagataccttggataggttaactgtgctggatatggttgagtttaacgacaaaaagccatcaacagctgtggacagaacctcatccttagattgctcactatggatatgtgctctgggcgtgtttcttgcatgatggccattggtcaattcatgcctgggccaatgtaggattagccttaaattactttttaaaagtagcctcatttagctggactaatggtggggcgtatgatcctgcatttggcctctggggtaatcaggggcatttaggtttccacataatagcaaat

SEQ ID NO: 451 - DNA, 675 bp, Hepatovirus sp.
gcaaggggtggttttaaccttgcacgcgtttaccgtgcgttaacggttttccatgtttgtatgtcttgtttgtattatgtgttttgtaaatattaattcctgcaggttcagggttctttaatcatgttgggctgtacccacactcaacttttggccataagtgagtttcttaacgaaccttttaacacaggatgttattagggcccaatattttccctgaggccttctttggcctctattttttccccttttctatctccttgtattccgggctcacgtgatgccaatggactgacccatgcgcccgtgggggttaactactggagtagccagtagctgtaggtgctaaaagtcacgtacgtgtaagactggacgagacctctcagctataactgaaagtagtaagtatgtctgaacttcttgaaggggtaggctacgggtgaaaccccttaggttaatactcatattgagagatacctctgataggtgaaggtttccggtagaggtgagtttaacgacaaagcctctcaacggatgtgggcccacctcatcagcaagatgctttcatacccaataccgtaggggctgggttgttgagttcagtcccaagcgtccctcccgcaaggttgtaggggtactcaggggcatttaggtttccacaattaaacaaataca

SEQ ID NO: 452 - DNA, 675 bp, Hepatovirus D
ctttggatgcccatagtgcgggggtataaataccgcactccctttagctgttccgagggtatcggaacctatatgtttgttttctgtctgtctgtcagctttatgtgtgctcgtcccctttagggcactcatttcagcttgctttcattcttttcttccccggttctcaccttaccggaggcactggccgttgcgcccggcggggtcaacctagtgattagcactaggctgtaggtgtctaaagtggtgacattaagacttggtaactgatttcagcactgttaactgatgttggggatgacttgattgatcttctggaaggggtaggctacgggtgaaaccccttatcttaataccactatgtagagatagattcagtaggttaagggcagtggataaggttgagttcattttggacaataaaccttcaacactggtggacccaatctcactgaccagatgctttcttgactgatccttcagaggggtgattcttctgaataggttgccttgacactgatgcctgagacccattgggtcgggccttaaatcatggaactccactggactttcatggcctagcttctgccttagacagactctggggccccacgaccctctgggcccttcggggtactcaggggcatttaggtttttccacaattaaaagagtta

SEQ ID NO: 453 - DNA, 560 bp, Hepatovirus sp.
gtcatgtttctctttaagaacactcaattttggccataagtgagactcttgtcgaacctttcatgtcaggaccatgttagggccattatccttttccctggggcattcttcttgcccctgtttcatctttctatcatctttcttccgggctctcacaatgccaatggagcgaccgatgcgcacgtcggggttaacccatggattagccatgggctgtagctgctaaaagttgtgactcctgaagcatactatcaatggtagtagatgtaactgaaacactgaagcttctctgatcttgaaagaagggtaggctacgggtgaaacccttcaggttaatactcatattgagagatacctttggtaggttaacgttggcggataatgttgagtttaacgacaataaacattcaacgcctgtgggcgaacctcaccaatttcatgctttgaagtgaatgtgcgtagggtctctatcggagatgctatgtggatggtgccctccctggaaacaggttgtaggggtactcaggtgcacttaggtttccacattttaaagatttttc

SEQ ID NO: 454 - DNA, 675 bp, Hepatovirus I
ggctgcctgtgtctcaggggtaagtactggggccgcgttgaccgtgcggtacggttatgcttttagattaggatgtccgtctgtccggcactctcttttgcttaaaatggccttaaatccatgggaggcgtaaccatgggccctttgttacctagacatgattgcattgggggccgtccttggggcttaggccccagccatttctcttgactcgtctaagagtttacttcatccttttctttactttattttccaggctctcagcatgccgacggctctgaccactgcgcccggtggggttaactgcatgattagcatgcagctgtaggagttaaaagtgctgacaggccaattctgacgtaagtccactctatattaacttgatcaagtaaggttgattgatctttgtgagagggtaggctacgggtgaaaccctctaggttaatactcatattgagagatacctccagaaggtgaaggttggcggatattggtgagttcttttaggacaaaaacctttcaacgcctgtgggcccacctcactggcacaatgctttcatccccaattgtgatgggtagtttggactgaaatcaggagtaacctgccctacgagtttaggggtagttcaggggtatttaggcttccacatttgatagagtttatgagagtgagcc

SEQ ID NO: 455 - DNA, 527 bp, Hepatovirus C
ttcaaaagccccagcggggtttcattaccccgctgtggcttttggacttccctaggatggggaagtaaattaccatcctcgcgtttgccgtgcgttaacggctacttttcttctagctgtagaagtaaaattcagcatgttttatgtttgtttgtcttgtttgttatatacatttttacactcctacaaatgcacatgaagaacagtttgtagagattaacaaacgcttagctgaacctaggtggtgaatctagtagtaagataagtagaggaagctataccttaagttggttgggccctcgtgtttgctctataaacaaaaccaagtgagtagagtggatgaacagtactaaatccctgagtacagggaacctcacaggtgtgatacacttatgtctatgtgacctggttggaggttgggcgtgccctatgatactggagtgggagatcttttggggaacccacgttttcacactgcctgatagggtcttgccgagagactcacttgtttcggctgtacttgtaac

SEQ ID NO: 456 - DNA, 665 bp, Fipivirus A
tgcgggtaaactcccgcatgtgtgaatgaggcgatgtcccaggaactaactgccgatcctggttttaactacgatccgtatttgttactaatgcgatatccccccattgtttgcctccatgttgttttcaacgcttttggccttgagtgttatcaagtgttttagcgacatagtgggaagctacggctgcgtccccatttttgagtggcgacccagttttagtggccactctgtccctgaactgcgctataatgtgaatttatgttcacaaaaacggactgatgtaactgttaatgactaaggaatagtacctcactgaagtatcaagaccccgttcgagcggtgtacatatatggatggaaaccttgtctgagtcatctcgaatactaatcaatgagggatgtcgagtaagcatatcatgaaccacatagaatagtggggtttcggggttagaggctctctgcagcaatgtatctctaacaccatggccgaaatgagagatagagaccacgatgtttgtgtgtaagtaatgatgtgtggaaagaaaattctgaatgttggtatgatatcagtctaaggggagtggctcacctaagagctacccaaacatttcacagcagacaacataacgtactgagagtagttggaaggttccagaaatcagt

SEQ ID NO: 457 - DNA, 467 bp, Fipivirus C
cgcggttaaacccgcgcaaccttctttcagccgcgtctgagtagcgcggttagtcctgatacacagtttcctgttgggtactgtgtcttcgggtgaatgctcttgtgtgaatgttttaggctgtttaagggaagcgtttccccgtgcgctgtgagggtttctcacgctctttcggggtgcagtctcttctgttgttcattaagatgtatggatgcactgttgtgaaggatttgtgaactggggatcgacaccccgtgaggggtgccccagtgtccataggagtttgctggagaggtgtgttgctgtagtgactatccgtgacctggcattctaaggtgttgaccccaacctgtgagggtctggatcgcagtgttgaagtgctttggagggttcaatggggtttctgtagtggatattatgtgcttgacgactactggtacgagtgtattgggggtctacatgtgtga

SEQ ID NO: 458 - DNA, 657 bp, Fipivirus E
ctcttccgatcttgggggttcgcccccatgtctcatttcaactagccgtgtgtctagttaacgcaccgcctcaccctggtcgttatcgggtcggttcttgcgaccgttagatcgtgagcgtttctgaggatcagttcgtataagttctccggtgtggcgaccgtaaaatcgtcacgtcccatgcaatagatgacgttaaactcgtttgccagttacataaaggaatgttgttacttttaaattgtctgttacatttaacatcttgccagtatgatgctactgtacactacgggtgtaggaaccttgtagtgtgacgtatcactcatatgtggatgggtgctccagacctttatggaagctctcagttagtagtgatccttgacttcattgagccctggtaacagtggaagtcaagatgtatatgttgctcaacacacttcggtgctacgaagctgtttgtggaagtactggcgaggttcattctgaatcatatgtttgtcacatagtcagggagtgccgtcgcttacgacggaccctttttctttataattacaaatctgtgtctcaagtgttgttggctggttttcttcttctgttttcattgttcatatatatacgtcagagtgaaagactcggtatatacaaaactgatccaga

SEQ ID NO: 459 - DNA, 506 bp, Aquamavirus sp.
ttcaaaggtggcgggagagttggcctcacgctgtttagcgtgagagctggctctcctgccccttcccctgagccggggatcttggctcattcccctcttttctatcctccctcattggactttacggatgacccggcataaacttgacaaccgatgttggatttcccttgtggctgtgatggaggacataccctcgggtgtagttgtgtgcgtgtcgctctgcgactcgagcttcaaagtggtgctgaaatattgcaagcgtcgttgctcgattaacggagtggtacaatcctatgaacccaagtgcattcatgcgaaagccccggaggggtgagtagcatggactcgaatcagaagagctggagctcgcttggtacggcacgtagcattgctttgcctaaagaccaagggggtatggctataggtgggggcctatagcttgtccagtgctggttgacagactcgtgctacgcgtctggttcgagtataagtagctgcaactcact

SEQ ID NO: 460 - DNA, 548 bp, Avisivirus A
ttcactcgctttccccccctctctataggggcggtcttttaattcttattaatttcctactttactatcaaatttcttctaagtagggactgaggtcacttagccctccctctcctgggctttccagggttatagaggttctaaagctaagccatgtgtcttgagctacacttagtacaaaggtttagtaatgattgtacatgccagtaaccttctagtgcccatggattaaagagtggtaacactctccatggggcccgaaaggctagtgggcatagttggcatcaaggaaggggtccccaccccaacctgaattgctggctagaagctcaccttagaagaagtgctgggtgacaacgtgtccaatcgtgaacgactgatggaaacgtgtggagatggatatgtgggggttcactgagtagatgccctgaaggagaaatctgatcaggggcccgtgactatacgctaggtaaaccgggtataaaaaccatgaaaggtggcccaaaatctcttccttttattttatttctatgttggtgacagtcaag

SEQ ID NO: 461 - DNA, 492 bp, Avisivirus B
caccccctactgccctaacccccaaagttagttatagggtggctccctacccttactccacggggtaagccctaacccggttgaatctcaagatcagccttagcgaggactattagtaccgctcaaaccctttgcctgtagtgcccaggggtcacagaggggtgaccctctccctggggcccaaaaggctaggtggcaagacagggtccaagtgaggggctactctaagtagccccaagctgaacatcctgtctgaagccacccttgcagggccaggtttgattggggaaactagacaccagctttgtcctgggattggggggatatcgagttagtccaggaggtgcgagtagatgcccccgaaggtaccccaggcacatctgggatctgatcgggggcccgtgactatacaataggtaaaccgggttaaaaaacatgaaagcgcctctctctttcctacttcttttattgactggtgacaaaaatagcagt

SEQ ID NO: 462 - DNA, 517 bp, Crohivirus A
gttgaagtccatttcttgcttgcccccgatgaatcctgttaaggcctcacggccctaagggtgaaactcggttatcccctcctgtacttcgagaagattagtacaacactatgaaatctacatcttgtgatccgggataaccccaatcccagaaacctgtgatgggcgtcaccacccctcttatggtaacataagggtgtcgccgcgttggcacaggaccctttgggctggatgtttttagtaatggtgtcgaaggtcctattgagctacaggagtttcctccgccctggtgaatgcggctaatcttatccctgagcctaaggttgcgatccagcaacttgatggtcgtaatgcgtaagttgggggcggaaccgactactttccagaaggcgtgtttctttgttttgtctgttactatggtgcatgatatagatattgaatatttgatctttttgagctgtttcttatcttattgctacatcctttcaggtgttggatttacattttggttaataag

SEQ ID NO: 463 - DNA, 393 bp, Kunsagivirus B
gattttctggttatcccttttggacttggtaggggcccacgtgcccacccacctctgtgtgtgttgatttctaatcgatgcctggcagtggcggccacctctccttactggtaaacctccggtgagtgaagttgtcaagctacaggtaccgtgcaggatgaaatgcgcacatgtgaacaaactaggagtcatacaccgggtcaaactctggaaacggagtccgggactctgaccttggttgggtgagctcgaggcatcacattgatggacgcgattcgctatccttccctagtaggaccttgtggtgtacccctggttgggaatccagggctggtcgggtgcagggtgacagcctgttctccacctcaaccattgtaggagaaatcaacccct

SEQ ID NO: 464 - DNA, 675 bp, Limnipivirus A
ttctttggatatccatttaacgtgtaccctatacgataattggggtggattctggatgcctagttccagtgattggttaagaactcgtttactacgtatagtatgattagcaaagtgctcgattgatcacgtaatgatctatgtggttaaaaacccagtagtatggtatatactcagtagtgtacactgtgagtacaactcttggcgtagagagaacaattcacccgaatccgtggcgtatccatggaaataagtttacctaattgtatgttacaaggcatatgagacatttatgagatatggtttattttgactaaacgagtgtagaggtggtggagtctatccaacttcaagccatgcaattgttgtgttgattgatatcattgaccatttttgtggattgtgtacacatacaatttgaaaattaaccccctcaagaataagacatgggaccattcgtggtagataccgtgctcggatgcttgagattagatgggttagactagttttggaatgagattgccgagaaagtcccgctagacatgttttacaagtcgtggtattccgctagactttttcgcagacacatggaagggtccatgtgttgtgcaattgcagggtgacagcccaactgcagagttttccttactagaataaaaatctgttgtcaatttt

SEQ ID NO: 465 - DNA, 501 bp, Limnipivirus C
gtttctgagcactggtaagagcttagacaaacgtttttaaaatttattttctctgcaacttttgtttgtgtttatttttatttgttaattttgcgcctaagcatttgttgcgaagtatttgattcattagtaatattacttattgtttatttagatggtattcaaagtggtgggagtatcgaacccaagcgtcgtatgctatctccttgaacaatttttaatcattgcgaagtgatcattgaaaaggataggtgtttaagaactcaaagagtgttaataatgttgggtgacaggtgtccccatagaatttattaacatgatttggactggttatctagtaagaagaaccatcgaacgcacgagcgagcattgcttgcggggcagttaccctgcgtcgatgtaagtgtgtaccggggggtgcacatgttgattctttatggcctgatagggtgcgtcattcgcgcctagataattagtataatgcgaatggaataaatttac

SEQ ID NO: 466 - DNA, 675 bp, Orivirus sp.
ggtcccaggccaatattcttcgtaaggcttggttccaattttccaccactcgtgtttgggttctggcctatggtacccagaggggcggtttgggggaattaactccccctcccctgtggtcctataccaccccacacctctgtgggctttctttactatcttcttgttttccgacttttaaacactaggcaggcgcgcctagtcatacaccgcccggctggtctttccagctcttgtgggcggtgcgcgctggtccatcgtgcccagcgacatagcaccttgtggacacctccgaacgccctcccctgtatggggtggtgcccaggggtttcagtgtggtgacacactccctggggcccgaaaggctagtgtgcaacaggtgaggtacagccagctgcccccgtggctggagggaccaagcttgtgaagcacacctcaccttcttgggggtgggctagtaagtggtgaaagcatagtgtccgtgtcgctggccaacactttgggtcaagtccagccactcagtgagtagatgcccaggaggtacccctagtggatctgacttggggcctgttacttaatgcaggttaaaaactatgaaagctgagtagtgtagcccggctggtggcttctcttccttattcattctattttatggtgacaaacgcaactgaagcc

SEQ ID NO: 467 - DNA, 675 bp, Hepatovirus A
cttgatacctcaccgccgtttgcctaggctataggctaaatttccctttccctgtcctttccctatttccttttgttttgtttgtaaatattaattcctgcaggttcagggttctttaatctgtttctctataagaacactcaattttcacgctttctgtctcctttcttccagggctctccccttgccctaggctctggccgttgcgcccggcggggtcaactccatgattagcatggagctgtaggagtctaaattggggacgcagatgtttgggacgtcgccttgcagtgttaacttggctttcatgaacctctttgatcttccacaaggggtaggctacgggtgaaacctcttaggctaatacttctatgaagagatgccttggatagggtaacagcggcggatattggtgagttgttaagacaaaaaccattcaacgccgaaggactggctctcatccagtggatgcattgagggaattgattgtcagggctgtctctaggtttaatctcagacctctctgtgcttagggcaaacactatttggccttaaatgggatcctgtgagagggggtccctccattgacagctggactgttctttggggccttatgtggtgtttgcctctgaggtactcaggggcatttaggtttttcctcattcttaaacaata

SEQ ID NO: 468 - DNA, 675 bp, Hepatovirus A
cgccgtttgcctaggctataggctaaattttccctttcccttttccctttcctattccctttgttttgcttgtaaatattgatttgtaaatattgattcctgcaggttcagggttcttaaatctgtttctctataagaacactcatttcacgctttctgtcttctttcttccagggctctccccttgccctaggctctggccgttgcgcccggcggggtcaactccatgattagcatggagctgtaggagtctaaattggggacacagatgtttggaacgtcaccttgcagtgttaacttggctttcatgaatctctttgatcttccacaaggggtaggctacgggtgaaacctcttaggctaatacttctatgaagagatgccttggatagggtaacagcggcggatattggtgagttgttaagacaaaaaccattcaacgccggaggactgactctcatccagtggatgcattgagtggattgactgtcggggctgtctttaggcttaattccagacctctctgtgcttggggcaaacatcatttggccttaaatgggattctgtgagaggggatccctccattgccagctggactgttctttggggccttatgtggtgtttgccgctgaggtactcaggggcatttaggtttttcctcattcttaaataata

SEQ ID NO: 469 - DNA, 519 bp, Parechovirus F
ggtcggggagatgtgttcatgatcggttaacaccatcatggatcatctctccccgacctctttttgacccagctatgggttaaatagtacttttcttttctcttttgctttcttttgtgttttgtttgttttgcaacatataacaagcattttatcagtattagtgtctgcaactgtataacaagcaaggtggagcaatcatgcgagtatatctcaattgaattgtgacacacaagtgtgcactatgtggaataaatgccattttggccaaacctggttagccagaccagtagtaggacaatttggcacccttagtgggcgcgacctagatgctagggatgagcaaacctatttcccctgagtacaggggctctccttcacctctacattttggacctctttttgagtatcctcgatagaaggtgaagtgacggtgtaccggatggttaattgatctcattgctgggtgacagcccgctaggaccaggcagcatctttgtatggacctgtacatgtaac

SEQ ID NO: 470 - DNA, 343 bp, Parechovirus D
acatggggcaggtgtgctgtgccaagagcaacactacggtggccgagccgatggttcgtcaccacgtagtaggactccgtagtgcttggttacggcggacgtaagtcagttgagtgatgtctaagtggcaaaccatgagtacatggtaaccttgtgtggactcgcgggacggaatttcctatcccattgactccttgtagcaaggtgggtatacccaaccacaatggcagcaccctgggtgggaacccaggggcctggattagtatccagtcacacagcctgatagggtggcggctcagccactgaccagcgtctctaaataattgtgagctgttcatgcacc

SEQ ID NO: 471 - DNA, 675 bp, Parechovirus C
cggtcatccccctttccccacagccggtgtgggttctaatcggctcctactaaacacctaagcatcactgcgcctctatctctcctatccacaggtctaagacgcttggaataagacatgtgggtgcaataggaagattagctagtccaatctctccttccagctacgcttctcccttcgatgagcgtagggggggcccccacctccctcatctctggatagggctcttgctacggggctttcccgtctggaccagcaggcccactggtgcgcttccattcaagtttagtgtgcattactgtctgaaatattgctttgctaggatctagtgtagcgacctgcatattgccagcggacttccccacatggtaacatgtgcctctgggcccaaaaggcatgtctttgaccgtatgcagtacaaccccagtataggtcctttctatggcagtatggatctcagtgatgagtctatacagaatatggaagtggttcggatatgtcagcccgaaggatgcccagaaggtacccgcagataaccttaagagactgtggatctgatctggggcccaccaccttcgggtgggtagaagctaaccatgccttgggttaaaaaacgtctaagggctgaccagacccgggggatccgggttttccctatcttgacctactctaatc

SEQ ID NO: 472 - DNA, 675 bp, Unknown
  source: /note="Description of Unknown: Ljungan Virus 87-012 sequence"
ctcattgcccacacctggttggttcccaggttcatacaataaccatcaataaacttttaacatctaagatagtattatcccatactagactggacgaagccgcttggaataagtctagtcttatcttgtatgtgtcctgcactgaacttgtttctgtctctggagtgctctacacttcagtaggggctgtacccgggcggtcccactcttcacaggaatctgcacaggtggctttcacctctggacagtgcattccacacccgctccacggtagaagatgatgtgtgtctttgcttgtgaaaagcttgtgaaaatcgtgtgtaggcgtagcggctacttgagtgccagcggattacccctagtggtaacactagcctctgggcccaaaaggcatgtcatttgaccactcaggtacacaaccccagtgatgcacacgcttagtaatggcttagtaacaaacattgattgatcatttgaaagctgttaggaggtttaggtatgacgggctgaaggatgccctgaaggtacccataggtaaccttaagcgactatggatctgatcaggggcccaccatgtaacacatgggtagaagtcttcggaccttgggttaaaaaacgtctaggcccgccccccacagggatgtggggtttcccttataaccccaatattgtata

SEQ ID NO: 473 - DNA, 675 bp, Parechovirus sp.
gccgtcgggccttacaccccgacttgctgagtttctctaggagagtccctttcccagccagaggtggctggtcaaacaataccaaacgtaactaaacatctaagataacatagccctatgcctggtctccaccagttgaaggcatcttgcaataaaatgggtggattaagacgcttaaagcatggagtcaattatcttttctaactagtgatcttcactgggtggcagatggcgtgccataactctattagtgggataccacgctcgtggatcttatgcccacacagccatcctctagtaagtttgcaaggtgtctgatgaggcgtgggaacttattggaaataattacttgctgcgaagcatcctactgccagcggatcaacacctggtaacaggtgcccctggggccaaaagccacggtttaacagaccctttaggattggttaaaacctgagtaattatggaagatacttagtacctaccaacttggtaacagtgcaaacactagttgtaaggcccacgaaggatgcccagaaggtacccgcaggtaacaagagacactgtggatctgatctggggccacctacctctatcctggtgaggtggttaaaaaacgtctagtgggccaaacccaggggggatccctggtttccttattttagtgtaaatgtcatt

SEQ ID NO: 474 - DNA, 631 bp, Parechovirus sp.
agagtccttttcccagccagaggtggctggttaaataatacctactgtaacaaaacatctaagatgtaacaaccacacacctggtctccactggccgaaggcaactagcaataaggcaggtgggttcagacgcttaaagtgtgttgtacatattcttttctaacctgtgttttacacagggtggcagatggcgtgccataactctaacagtgagataccacgcttgtggaccttatgctcacacagccatcctctagtaagtttgtaagatgtctgatgacgtgtgggaacctgttggagataacagtttgctgcaaagcatcccactgccagcggatctacatctggtaacagatgcctctggggccaaaagccaaggtttaacagaccctttgggattggttcaaacctgaactgttatggaagacatttagtacctgctgatttggtagtaatgcaaacactagttgtaaggcccacgaaggatgcccagaaggtacccgtaggtaacaagtggcactatggatctgatctggggccagctacctctatcttggtgagttggttaaaaaacgtctagtgggccaaacccaggggggatcctggtttctttttaatttaagtaatcact

SEQ ID NO: 475 - DNA, 675 bp, Parechovirus sp.
gggccttataccccgacttgctgagtttctctaggagagtccctttcccagccctgaggcggctggataataaaggcctcacatgtaacaaacatctaagacaaaataatttgccttgcacctggtccccactagttgaaggcatctagcaataagatgagtggaacaaggacgcttaaagtgcaatgatagttatcttttctaacccactatttatagtggggtggtggatggcgcaccataattctaatagtgagataccacgcttgtggaccttatgctcacacagccatcctctagtaagtttgtgagacgtctggtgacgtgtgggaacttactggaaacaatgctttgccgtaaggctttcattagccagcggaccaccacctggtaacaggtgcctctggggccaaaagccaaggtttaatagaccctaatggaatggttcaaacctggagcattgtggaaagtacttagtacctgctgatctggtagtaatgcaaacactagttgtacggcccacgaaggatgcccagaaggtacccgtaggtaacaagtgacactatggatctgatctggggccaactacctctatcttggtgagttggttaaaaaacgtctagtgggccaaacccaggggggatccctggtttccttttattttactttgtcaat

SEQ ID NO: 476 - DNA, 433 bp, Parechovirus sp.
ctctattagtgagataccacgcttgtggaccttatgctcacacagccatcctctagtaagtttgtaagacgtctggtgacgtgtgggaacttgtgggaatcaatattttgctttaaagcatccattagccagcggataaaacacctggtaacaggtgcctctggggccaaaagccaaggtttaacagaccctagtggattggtttcaaaacctgaaatattgtggaacacactcagtacctactgatctggtagtaatgcaagcactagttgtaaggcccacgaaggatgcccagaaggtacctgtagggaacaagagacactatagatctgatctggggctggctacctctattttggtgagtcagttaaaaaacgtctagtgggccaaacccaggggggaccctggtttccatttattttacaaaggcact

SEQ ID NO: 477 - DNA, 488 bp, Potamipivirus A
cacatggaaagcttttcgcttccatgtttacgcacacactctctttgacaccctgttgtatggtgttaaactacaacatttgtctgtctataatcgtttattttgtttaccctatatgtacccaagtatttgattgcttgactcacataagcatcggtaacccatactgttttatgagctactacctctgctgtctacatacattttatatgaatggtttgagctctgcctcaggatcaaacatggtaacatgttcctttggtcagttagaatcttattgtataatctaaggtgtctattagtacgtagaaagttgtaacacatatggggcctgatagccgctatctctgatggatgtaaggtaaccttctttaggtctgatacattctgcacaggatccaattttcggtgccctgtacgagtgcactcttatgcacgaggacgagatatgctacaacccactgcaaatttaaacccaaactttaaca

SEQ ID NO: 478 - DNA, 675 bp, Potamipivirus B
tttcaacgtcgtggctgacgttaaaaagccacaattccacttaccttttaccttttatgtttaatgtttgttagttttgtgatctttaacaaatagatctaaataatttgttggtaaccaatctcggatgtttcggctgcattgtagtttatttatttcattttagttgtaggtggccactacgtcctggaatcatacatggtaacatgtacctcggcggttatccactattacgctaatctaagaatatttaaatgaaaatgtaagtgttacggctgactttgggcctgatagttaaatgctcgcactgacagatagtaccctcctttaggatcgattctgttacatgggatccattttggtgccccactgattcaacctctttgttgaaaaagagttagcatactacaaattttccaaacaaaaaccctttttaatgactacaacttatgattttatgaattttactgctcttgaaaaagatattttgacattgatcgctgtactgtttcagacattcattgcatccatttttgttggctactcctcacaaactcaaaacttttccacacgagaaaccttgtttattgaattttgcctttatattttggaacttgttgttggatttattgtttgcttaattattgacctcacacctgttttaaacactacaat

SEQ ID NO: 479 - DNA, 546 bp, Unknown
  source: /note="Description of Unknown: Beihai Conger Picornavirus sequence"
gggacaaccccacagctggtacaaccattgtgggttggtctccaccctttttcaaccgtggcaacttcggttaaagttgcaaatcccccctctccctattccacctcccttactttcactccccatatatggtcccagattttattctacctctttatatttttatttagtacagtggtggtgaattactcccagcataaactttgctggatcagtgttcatcaagcatactaattactaatgtactgagctatactattatctggcatctcacctggataaccggtgtgaccatatttcctaggttgcctccctatgtattttgtagcacctgtgcatctgcacgttggggcgacaaattgtaggtttcctggcacgggtaagaattgtggaaagctagtatgcagttaatgcaagggcgcgtttttcgctaccccgacactgctaaagtttttgggaggggtcccttaaacatttctagtattgagtgatagctttgcggcaggtcaccacaaccttactataaataaacctgttgaatctcac

SEQ ID NO: 480 - DNA, 457 bp, Sapelovirus sp.
tacgcatgtattccacactcatttcccccctccacccttaaggtggttgtatccccataccttaccctcccttccacaatggacggacaaatggatttgacctcacggcaaacacatatggtatgatttcggatacaccttaacggcagtagcgtggcgagctatggaaaaatcgcaattgtcgatagccatgttagtgacgcgcttcggcgtgctcctttggtgattcggcgactggttacaggagagtaggcagtgagctatgggcaaacctctacagtattacttagagggaatgtgcaattgagacttgacgagcgtctcctcggagatgtggcgcatgctcttggcattaccatagtgagcttccaggttgggaaacctggactgggcctatactacctgatagggtcgcggctggccgcctgtaactagtatagtcagttgaaaccccccc

SEQ ID NO: 481 - DNA, 489 bp, Sapelovirus sp.
ttgaaatgggtgtggggtacatgcgtattacggtacgcatatattccacactcatttccccccctccacccttaaggtggttgtatccccataccttaccctcccttctaaaacagatggacaaatggatttgaacttatggcaagtgaatatggtatgactttggatacactttaacggcagtagcgtggcgagctatggaaaaatcgcaattgtcgatagccatgttagtgacgcgcttcggcgtgctcctttggtgattcggcgactggttacaggagagtaggcagtgagctatgggcaaacctctacagtattacttagagggaatgtgcaattgagacttgacgagcgtctcttagagatgtggcgcatgctcttggcattaccatagtgagcttccaggttgggaaacctggactgggcctatactacctgatagggtcgcggctggccgcctgtaactagtatagtcagttgaaacccccc

SEQ ID NO: 482 - DNA, 675 bp, Sapelovirus sp.
ccaaggatctgttgcataggcgttgtatcccctaaccttttacctacccatcccaataggactggtatttcggttttgattgagtaatggatactgattctatacctgttacccattcaggggaaaaatggagtttctttcatggatctgacttgatatgaccaagagtcaacactttgcgtgttggccgtatggaatgctttaaggtttattctttggattatgacttcagggttggccgcccaggataaaaggcaattgtggtaagtgatgttagtcattggtggttgaaacctgcctaagacgtcctaggtctacgctgtgcgggccgaagtaagcttaggaataacagggagtatgccattttctgctttcacccaacacgaccgtacacgaaagagctagaggcactttggggcaaagggaaaagctttgcttagcccgaatgttcatttgagtccttgacgaatgcgtcccgtctgtcccgacggtgaggcgtatggcgcatgctcatggcattacccaatggtgtatctgtgaggggggggctcctcacacttagtctagtgctacctgacagggccgcggctggtcgtttgtgtatggtataaccagtagtaatcccccatggattgctttaacttcccctcctcccttaccaagacattctctaag

SEQ ID NO: 483 - DNA, 579 bp, Sapelovirus sp.
ttttaacttgttatgacattcaaggaaaaaatgtctttttcattatgggactgacctgtttatgaacatgagcagcggcactgctccacgggctatccgtgtaagaaatattgattattcttatggatcatgatttcagggttggccgcccagtctaaaaggcaattgtggtaagctatgtaagtagttggctgttgaaaggagccaagtacatcctaggtctacgctgtgcgggccgaagtaagacttggaacaactctgagtaggcagtttttctctttagcccaacacgaccgcatactgaagagctagaggcactttggggcaaaggtaaaagcattgcttagaccgaatgttcaatgagaccttgacgagtgctgtcacagtgtcccctgatggcagtatggcgcatgctcttggcattacccatatgtgtatctatagggggggggccccctatacttagtctagtgctacctgacagggccgcggctggtcgtcggtgtgtggtataaccagtagtaatcccccatggattgctttaactccccctcctccctcaacaaaactttctctaag

SEQ ID NO: 484 - DNA, 522 bp, Rabovirus C
ccgggtataacccggagttttggggcaggtccaagccccacataggaacatacgatccacggatcgtgtgttcttttatgctttctaaccttaccctttgtaaccattacgctttacgccgcatggtgtttggcggcaccatgacgtggacaagaggttacgccattacgatatgtaccctccccttttggggagagaccgaccaattatggtacagtatccaactgtattgtggtcaagtacttctgtttccccggtgatgcgggataggctgtacccacggccaaaacctgctgatccgttacccgactcacatctacgaggaggctagtaaaaggcatgaagttcaagagtatgatccaaccagatccccactggtaaactagtgatgagggttcccgttccgaacatggcaacatgtgggttccctgcgttggcactaggccccttccgaggggtgctctgaagatggattgttgatgaagaccaatttgtgcatgtgtttatcctccggccctctga

SEQ ID NO: 485 - DNA, 551 bp, Rabovirus A
ccgaccccactggtcgaaggccacttggcaataagactggtggaacaaggtcgcctgtagttgattggaaccttctttctaatgacttatgtcagcggtgctactcacaccgtaactctcctaccctatccccacgcttgtggaactaggaggggatgagtgattcaagtaagtactgtcagaatggtgaaaataatctgattctgaaacgctatggatccatcgaaagatggggctacacgcctgcggaacaacacatggtaacatgtgccccaggggccgaaagccacggtgataggatcacccgtgtagtttgagatcatatcaatgttcatagtctagtaagatgatttgaaatctaactggtctgatggctaactgcttgtcttattgcggcctaaggatgtcctgcaggtacctttagagaaccttaagagactattgatctgagcaggagccaaggtggtctttcccagccttggttaaaaagcgtctaagccgcggcagggggcgggaggccccctttcctcccaaactataatatagattgt

SEQ ID NO: 486 - DNA, 675 bp, Parabovirus C
gatgtatccccatcccccagtgtgtatgccatactgcatagctcgcctatgccctatggattcacaaccctttcatataccctccctacccaaccccgtaaccacatgctttactccgcttggggttttgcggccccatgttgtgacgaaatggctacgcaatcaatgcggctaatggggcctgccgcttttaagtggccccagttagaagtttatgcacacccgcccattaggaggccaccagccaggtggtcagagggcaagcacttctgtttccccggtgaagtttgataagctgtgcccacggctgaagcagacagatccgttacccgcctcactactacgagacggctagtagtgtgtaatatccgaatttcattgatccgggtgttccccccacccagaaacgtgtgatgaggagcggcacccctcctatggcaacatagggcctctcctgcgctggcacacgggctctatgagcatgaaatcaggagaaagtcacacgaagaccttattgtgctagtgttgattcctccgcccccctgaatgcggctaatcccaactccggagcgcccgctggcaaacccgccagaagagcgtcgtaatgcgtaagtctggagcggaaccgactactttgggtgtggcgtgtttcctttatttcctttgtatttgtat

SEQ ID NO: 487 - DNA, 675 bp, Parabovirus B
aacccataatccattgtccatcaatgttttatgggggggaccctttctcccctccccctccaaataccttttacccctctgtaaccaagagtgtgcaaaatctatttactagcccagaattgcggcttctggggaggtttattcctcatgcctaacaagatgttacgcaaactccgggctacggccctgggcttttgccctaaagatttagaagtttacactatcgtccaacaggaggacaacaaaccagttgttctaaggacaagcacttctgtttccccggtgagactggatagactgtacccacggttgaaactggttgatccgttacccgactcactacttcgagaagattagtaggaaactgtgaaactgattccattgatccggatactttccccgtatccagaaactactgatgagggttgacttcccgactacggcgacgtagtgtcatccctgcgctggcagtaggcctctttgaggatggaagatgtggatcggtaaccgaaggtcctattgagctagtgtttatacctccggcctcctgaatgcggctaatcctaacccatgatctagtgctcacaaaccagtgagtagctagtcgtaacgcgtaagtcgtgggcggaaccgactactttggagtgaccgtgtttcctattttacttttgtttg

SEQ ID NO: 488 - DNA, 675 bp, Parabovirus sp.
accgttacgcaccactcagttggtgtttggtggcaccaatgatggaacaaaaggctacaccacttgggctacggcccgcgccaccttgtggcgcaaagacattagaagaatagcataccgcccactagggccctgcagccagcagggtaacgggcaagcacttctgtctccccggtagaacggtataggctgtacccacggccgaaaactgaactatcgttacccgactccgtacttcgcaaagcttagtaggaaactggaaagttcgagttattgacccggagtgttccccccactccagaaacgcgtgatgagggttgccaccccgaccatggcgacatggtgggcatccctgcgctggcacgcggcctctaagaggataactcgctcctactggtaaccgaagagccccgtgagctacggtttattcctccgcctccctgaatgcggctaatcctaacccatgagcagttgccatagatccatatggtggactgtcgtaacgcgtaagttgtgggcggaaccgactactttgggatggcgtgtttccttgttttctccatttgttgttgtatggtgacaagttatagatctcgatctatagcgtttcttgagagatttccaaacatttattcaagtcgtacaattcttgtgtttaagcagtacagtgtaagg

SEQ ID NO: 489 - DNA, 316 bp, Felipivirus sp.
gatgtcggatgacggctggccaccggggaaaaacggcaaatgtgcaccacctctgcaacccacgccgaccacgtttaaccatggcgttagtaggagtggaccactgcagtgggctctggtgtgcgacagtcagtggtagagtagacagtcctgactgggcaatgggaccgcgttgcgtatccctaggtggcatcgagattcctctgctacccaccagcgtggactcctatggggggggccccataggctaggtctatactgcctgatagggtcgcggctggtcgaccactgactgtataaccagttgtaactcact

SEQ ID NO: 490 - DNA, 553 bp, Boosepivirus A
ttgaaagacctcggcatatatcgttgtcacaacggtatatgtcgagatctttctccccaccccctccaattcccttttccccctcttgcaacttagaagtttgtacacacagggcaataggatacgtgatccagccaggacacgtgagctcaagcacttctgtttccccgtccccttcacgtactacgggaatgttagtaatttgtgtgcactttagtaaggttgatccgggattaaccccaaatcccagaaactggtgatgagcgttaccacccccgccgggcgaccggaaggtttcgctgcgttggcaccagggcttcggcaccagaaaaaggtaaagcaaatgaaggcgctactgtgctacgagaagtttcctccaggcccctgaatgcggctaatcctaaccagtgatccaccggtgcaaaaccatgtactaggtggtcgtaacgcgcaagtcgctggcggaaccgactactttgggtgtcctgtgtttccatattttattttattcaattttatggtgacaagagtaaagagatacagatttgcagcc

SEQ ID NO: 491 - DNA, 512 bp, Boosepivirus B
ttttctcccctccccctccaactaccttttccccctcttgtaacgctagaagtttgtgcaaaccgcctgtagggtactgcaatccagcagtgcataggctaagcttttcttgttaccccaccccacattatactgaggaggattgtgaaattgtgttagtatgggttagtagcggtgacccgggtaaccccaacccagaaactcacggatgagatgaacaggaccccacatggtaacgtgtgtgttcgtctgccccgcaaggtgaggccgtgagagctttgcacgcgaaaaccttgaaaacccaaaagtaccttgagctcttcgctattttgtgtttcctccaggaccctgaatgcggctaaacctaacccgcgatccgcacgtagcaacccagctagagtgtggtcgtaatgcgcaagttgcgggcggtaccgactactttggtgttcctgtgtttcctttattttattttgaatttttatggtgacaacagctagaaaataagagtgaac

SEQ ID NO: 492 - DNA, 506 bp, Unknown
  source: /note="Description of Unknown: Phacovirus Pf-CHK1 sequence"
gtgtgtcatttctcccctccccctcccaaaccttttccccctctaatcggattgattaacccggttaaagatgattaatggtttgtgagttgatatgatggcccggcattgaatccgggaattcttaagtaatggaattgcatccaatatgaaagtgagtgtggcaagctcacaagtagtacttggctctgcccattatttgaggaccaactcttcttgactacaatgtgtttaaagtaaactggaccacattgtgtatccagacaactccatttgataatgtacgctggaaacgttttcagtgcatagggtcctaaagtggtgctgaaatattgcaagctcaatgggatactgaacgctgaaaaccgccgctgttatcatatgggcccctagtgggtaaatgttggctttaggcatatactgcttgggaatgcagtactggttgtagacagggtgatagcctaccggctggcgtagttgagttggtatagccagttgattgccat

SEQ ID NO: 493 - DNA, 612 bp, Rhinovirus sp.
ttaaagctggatcatggttgttcccaccatgattacccacgcggtgcagtggtcttgtattacggtacatttccataccagttttatacaccccaccccgaaactcatagaagtttgtacacaatgaccaataggtggtggccatccaggtcgctaatggtcaagcacttctgtttccccggcacccttgtatacgcttcacccgaggcgaaaaatgaggttgtcgttatccgcaaagtgcctacgaaaagcctagtaacactttgaaaacccatggttggtcgctcagctgtttacccaacagtagacctggcagatgaggctagacattccccaccagcgatggtggtctagcctgcgtggctgcctgcacaccctgccgggtgtgaagccagaaagtggacaaggtgtgaagagcctattgtgctcactttgagtcctccggcccctgaatgtggctaaccctaaccccgtagctgttgcatgtaacccaacatgtatgcagtcgtaatgggcaactatgggatgggaccaactactttgggtgtccgtgtttcctgttttactttttcattgcttatggtgacaattgtatctgatacacttgttacc

SEQ ID NO: 494 - DNA, 627 bp, Rhinovirus sp.
ttaaaacagcggatgggtatcccaccatccgacccacagggtgtagtgctctggtattttgtacctttgcacgcctgtttccccattgtacccctccttaaatttcctccccaagtaacgttagaagtttaaggaaacaaatgtacaataggaagcatcacatccagtggtgttatgtacaagcacttctgtttccccggagcgaggtataagtggtacccaccgccgaaagcctttaaccgttatccgccaatcaactacgtaatggctagtattaccatgtttgtgacttggtgttcgatcaggtggttccccccactagtttggtcgatgaggctaggaactccccacgggtgaccgtgtcctagcctgcgtggcggccaacccagcttttgctgggacgcctttttacagacatggtgtgaagacctgcatgtgcttgattgtgagtcctccggcccctgaatgcggctaaccttaaccccggagccttgcaacataatccaatgttgttgaggtcgtaatgagtaattctgggatgggaccgactactttgggtgtccgtgtttccttttattctttatattgtcttatggtcacagcatatatagcatatatactgtgatc

SEQ ID NO: 495 - DNA, 615 bp, Rhinovirus sp.
ttaaaactgggtttgggttgttcccacccaaaccacccacgcggtgttgtacactgttattccggtaaccttgtacgccagttttatatcccttcccccccttgtaacttagaagacatgcgaatcgaccaatagcaggcaatcaaccagattgtcaccggtcaagcacttctgtttccccggctctcgttgatatgctccaacagggcaaaaacaattggagtcgttacccgcaagatgcctacgcaaaacctagtagcatcttcgaagatttttggttggtcgctcagttgctaccccagcaatagacctggcagatgaggctagaaataccccactggtgacagtgttctagcctgcgtggctgcctgcacacccacacgggtgtgaagccaaagattggacaaggtgtgaagagtcacgtgtgctcatcttgagtcctccggcccctgaatgcggctaaccttaaccccgtagccattgctcgcaatccagcgagtatatggtcgtaatgagtaattacgggatgggaccgactactttgggtgtccgtgtttcactttttacttatcaatttgcttatggtgacaatatatatagatatatattgacacc

SEQ ID NO: 496 - DNA, 660 bp, Enterovirus L
acatgggccagcccaccacacccactgggtgtagtagtctggttctatggaacctttctacgcctcttttgcttccctcccccatttctccttcgattgctccacctgtgatctttgcaacttagaagaaataatgaacccgcacaatagcgggcgctgagccacagcgtcaatgtgcaagcacttctgtttccccggaatgggcccataggctgtacccacggctgaaagggaccggcccgttacccgccttggtactgcgagaatgttagtaactccctcgatagctttaggcgttacgctcagccctttgagcccgaagggtagttcgggtcgatgaggctcgtcattccccactggcgacagtgtgacttgcctgcgttggcggcccggggtggggggcaacccccatccacgcctactgaaggacagggtgtgaaggcgctattgcgctactaaggagtcctccggcccctgaatgcggctaacccgaaccccgagcccacggtggtaaacccgccacaagtgggtcgtaatgagtaatttggggcagggaccgactactttgggtgtccgtgtttcctgtttttccatacgatggctgcttatggtgacaaccataagcaattggattggccatccggtgttcatattgcgaat

SEQ ID NO: 497 - DNA, 675 bp, Enterovirus K
tcagcctgacgcaagtgcctccattggagtctctccaagccctccggggcttggagggcgccgaccccctgcctagggggagcccacgacacggctggagtccattggcacaccgcagccacgattcaagccagaattgaaagcgggaagcacttctgtctccccggtgtggatcatacgctgtacccacggcgaaaagtgaagcatcgttacccgactcggtacttcgagaagcccagtacagttgtggatctctgcagggtatacgctcagcgtgacccctacgtagttccttgagatggctgagagaacaccccacgggcgaccgtgtctctcggcgcgtggctcaaggccgggccttcagtggctcggtgccttgcagagtgaagcctccgaacagcctattgagctaccgtttagcctccgccctcttgaatgcggctaatcctaaccatggagcgcccgcccacagtccagtgggtagagcgtcgtaacgcgcaagtccgtggcggaaccgactactttagagtggcgtgtttccaatttatcctttataaagttgcttatggtgacaccacaagagatccacgatttcttgtttcttatcactgagacacaagtcatattcatcaatctttattgcggaattaacttggtgcgtccaaacacatcagc

SEQ ID NO: 498 - DNA, 675 bp, Enterovirus sp.
caccctgagggcccacgtggcgtagtactctggtatcaaggtacctttgtacgcctattttatttcccttcccccacagtaacttagaagcttatctcatagttcaacagtagggtcactaaccaagtggctcagcgaacaagcacttctgtttccccggtcctagtacctgtgaagctgtacccacggcggaaggggaaaaagatcgttatccggccccctacttcggaaagcctagtaacaccattgaagcaatcgagtgttgcgctcagcacagtaacccctgtgtagctttggttgatgagtctgggcactccccactggcgacagcggcccaggctgcgttggcggccaaccgactcgggcaaccgggtcggacgctcgtttgtggacatggtgtgaagagcctactgagctagagggtagtcctccggcccctgaatgcggataatcctaaccccggagcacccacactcaatccagagtgcaggatgtcgtaacgcgtaagtctgggacggaaccgactactttgggtgtccgtgtttcctgttttacttactttggctgcttatggtgacaatctagtgttgttaccatatagctattggattggccatccggtgttttgaattgtgtgtttatactaattcttttacatatcacagacaaccaaat

SEQ ID NO: 499 - DNA, 675 bp, Enterovirus sp.
cggtacctttgtacgcctattttacccccttccccttgtaacttagaagcaaagcaaaccagttcaatagtaagcaacacaacccagtgttgtgacgaacaagtacttctgtttccccgggagggtctgacggtaagctgtacccacggctgaagtatgacctaccgttaaccggctacctacttcgagaagtctagtaataccattgaagttttgttggcgttacgctcaacacactaccccgtgtgtagttttggctgatgagtcacggcattccccacgggcgaccgtggccgtggctgcgttgcggccaaccaaggggcgcaagctccttggacgtcacttaacagacatggtgtgaagaacctattgagctaggtagtagtcctccggcccctgaatgcggctaatcctaactccggagcacatcagtgcaacccagcatttggtgtgttgtaatacgcaagtctggagcggaaccgactactttgggtgtccgtgtttcctgttttaccttatttggctgcttatggtgacaatttgatattgttaccatatagctgttggattggccatccggatttttgaaagagacccaaaactttcttctctacttcagattcaagtgcgaagttttccttttcatatattacttactaatttgaagtaccaaag

SEQ ID NO: 500 - DNA, 675 bp, Enterovirus I
ttagtactttctcacggggatagtggtatccctccctagtaatttagaagacttgaaaaaccgaccaataggcacctcgcatccagcggggtaaaggtcaagcacttctgtttccccgggtcgagtagcgatagactgtgcccacggtcgaaggtgaaacaacccgttatccgactttgtacttcgggaagcctagtaccaccaaagattatgcttggggtttcgctcagcacgaccctggtgtagatcaggccgatggatcaccgcattcctcacaggcgactgtggcggtggtcgcgtggcagcctgccgatggggcaacccatcggacgccaagcatatgacagggtgtgaagagcctactgagctacaaagtattcctccggcccctgaatgcggctaatcccaaccacggagcatttgctaccaaaccaggtagtggaatgtcgtaacgggtaactctgtggcggaaccgactactttgggtgtccgtgtttccttttaatttatcattctgtatatggtgacaactatagtgctatctcgatttgcattactattgttgagattaaaactttattacattgttgcattttaccctttgagtgagttttcacctgaacagattaatttactcatcctgtttatatattacaagcagaaatacttgcaaag

SEQ ID NO: 501 - DNA, 675 bp, Enterovirus sp.
gcaatgctgcaccagtgcactggtacgctagtaccttttcacggagtagatggtatcccttaccccggaacctagaagattgcacacaaaccgaccaataggcgcaccgcatccagccgtgcagcggtcaagcacttctgtctccccggtctgtaaagatcgttatccgcccgacccactacgaaaagcctagtaactggccaagtgaacgcgaagttgcgctccgccacaaccccagtggtagctctggaagatggggctcgcaccacccccgtggtaacacggttgcctgcccgcgtgtgcttccgggttcggtctcgtgccgttcacttcaacttcacgcaaccagccaagagcctattgtgctgggacggttttcctccggggccgtgaatgctgctaatcccaacctccgagcgtgtgcgcacaatccagtgttgctacgtcgtaacgcgtaagttggaggcggaacagactactttcggtaccccgtgtttcctctcattttatttaatattttatggtgacaattgttgagatttgcgctcttgcaacgttgccattgaatattggcttatactatttggttgccttttacaaaacctctgatatacccagttcttacattgatctgcttgtttttctcaatttgaagtatagactacaaatagcaaa

SEQ ID NO: 502 - DNA, 675 bp, Enterovirus sp.
cgtggcggccagtactctggtatcacggtacctttgtacgcctgttttatatccccttcccccgcaacttagaagaaaacaaatcaagttcactaggagggggtacaaaccagtaccaccacgaacaagcacttctgtttccccggtgatgtcgtatagactgtaaccacggttgaaaacgattgatccgttatccgctcttgtacttcgaaaagcccagtatcaccttggaatcttcgatgcgttgcgctcagcactcaaccccagagtgtagcttaggtcgatgagtctggacactcctcaccggcgacggtggtccaggctgcgttggcggcctacctgtggtccaaagccacaggacgctagttgtgaacaaggtgtgaagagcctattgagctacaagagaatcctccggcccctgaatgcggctaatcctaaccacggagcaagggtacacaaaccagtgtatatcttgtcgtaacgcgcaagtctgtggcggaaccgactactttgggtgtccgtgtttccttttgtttttatcatggctgcttatggtgacaatctaagattgttatcatatagctgttggattggccatccggtaatttattgagatttgagcatttgcttgtttcttcaacaatttcacctattcattgcatttcagcagtcaaa

SEQ ID NO: 503 - DNA, 675 bp, Unknown
  source: /note="Description of Unknown: PV3 sequence"
tacctttgtacgcctgttttatactccctcccccgcaacttagaagcatacaattcaagctcaataggagggggtgcaagccagcgcctccgtgggcaagcactactgtttccccggtgaggccgcatagactgttcccacggttgaaagtggccgatccgttatccgctcatgtacttcgagaagcctagtatcgctctggaatcttcgacgcgttgcgctcagcactcaaccccggagtgtagcttgggccgatgagtctggacagtccccactggcgacagtggtccaggctgcgctggcggcccacctgtggcccaaagccacgggacgctagttgtgaacagggtgtgaagagcctattgagctacatgagagtcctccggcccctgaatgcggctaatcctaaccatggagcaggcagctgcaacccagcagccagcctgtcgtaacgcgcaagtccgtggcggaaccgactactttgggtgtccgtgtttccttttattcttgaatggctgcttatggtgacaatcatagattgttatcataaagcgagttggattggccatccagtgtgaatcagattaattactcccttgtttgttggatccactcccgaaacgttttactccttaacttattgaaattgtttgaagacaggatttcagtgtcaca

SEQ ID NO: 504 - DNA, 675 bp, Enterovirus sp.
ctttgtacgcctgttttacatcccctcccccacgtaactttagaagcaattcaacaagttcaatagagggggtacaaaccagtatcaccacgaacaagcacttctgtttccccggtgattttacataagctgtgcccacggctgaaagtgaatgatccgttacccgctcgagtacttcgaaaagcctagtatcgctttgggatcttcgacgcgttgcgctcagcactctaccccgagtgtagcttaggctgatgagtctgggcattccccatcggcgacgatggcccaggctgcgttggcggcctacccatggctaacgccatgggacgctagttgtgaacaaggtgtgaagagcctattgagctactcgagagtcctccggcccctgaatgcggctaatcccaaccacggatcaggtgcctccaacccaggaggtggcctgtcgtaacgcgcaagtctgtggcggaaccgactactttgggtgtccgtgtttccttttatcttttaaatggctgcttatggtgacaatcatagattgttatcataaagcgaattggattggccatccggtgaaatacaaacacattatttacttgtttgttggatttactccgctcacacagcttactcctaagataatatttattgtattgctggtaaggagacactattata

SEQ ID NO: 505 - DNA, 636 bp, Enterovirus sp.
aagcaaggcaaacctgaccaatagtaggtgtggcacaccagccgcattttggtcaagcacttctgtttccccggaccgagtatcaataagctgctcacgcggctgaaggagaaaccgttcgttacccgaccagctacttcgagaaacctagtaacactatgaacgttgcggagtgtttcgttcagcacttcccccgtgtagatcaggtcgatgagtcaccgcattcctcacgggtgaccgtggcggtggctgcgttggcggcctgcctacgggttcgcccgtaggacgctctaataccgacatggtgtgaagagtccattgagctagctggtagtcctccggcccctgaatgcggctaatcctaactgcggagcaggtgctcacagaccagtgagtagcctgtcgtaacgggcaactctgcagcggaaccgactactttgggtgtttttccttttttcttctcttatattggctgcttatggtgacaattaaagaattgttaccatatagctattggattggccatccggtgacgagcagagccattgtttacctctttgttggatttgtacctttgaaccacaaagtcttgaataccattcatctcattttaaagttcaactcagctaaaagaaa

SEQ ID NO: 506 - DNA, 675 bp, Unknown
  source: /note="Description of Unknown: SA5 sequence"
agtacttggtattccggtacctttgtacacctatttacaaaccctaccccttgtaaccttagaagcaattatttaaccgctcactagggggtgtgctatccaagcacatcaagagcaagcacttctgtctccccgggaggggctaatggtacgctgtgcccacggcggaaatgagccctaccgttaaccggcagtctacttcgggaagcccagtaactacattgaaactttgaggcgttacactcagcacataaccccaatgtgtagttctggtcgatgagccttggcatcccccacaggcgactgtggccaaggctgcgttggcggccagcctgcggaccaaaagtccgtaggacgcctaattgtggacatggtgtgaagagcctactgagctagactgtagtcctccggcccctgaatgcggctaatcctaaccctggagcatccgcgtgcaacccagtacgtagggtgtcgtaatgcgtaagtctgggatggaaccgactactttgggtgtccgtgtttcttgtttttcatactgggtcgcttatggttacaactaattgttgtaatcattggcagtgcgcgctgaccacgcgattattgatatttccatttgttggatactccaatagtgtcaactcatatacacaacttttaccactgatcaagataaaa

SEQ ID NO: 507 - DNA, 675 bp, Enterovirus sp.
tgtgcgcctgttttgaaaccccctcccccaactcgaaacgtagaagtaatgtacactactgatcagtagcaggcgtggcgcaccagccatgtctcgatcaagcacttctgtttccccggactgagtatcaatagactgctcacgcggttgaaggtgaaaacgtccgttacccggctaactacttcgagaaacctagtagcaccatagaaactgcagagtgtttcgctcagcacttcccccgtgtagatcaggtcgatgagtcactgcaatccccacgggtgaccgtggcagtggctgcgttggcggcctgcctatggggcaacccataggacgctctaaggtggacatggtgtgaagagtctattgagctagttagtagtcctccggcccctgaatgcggctaatcctaactgtggagcgcatactcccaaaccagggagcagtgcgtcgtaacgggcaactccgcagcggaaccgactactttgggtgtccgtgtttccttttattcctatactggctgcttatggtgacaattgagagattgttaccatatagctattggattggccatccagtgtgtaatagagcaatcatttaccaatttgttggatttactccattaacccacacgtctctcaacacactacatttcatcttactactgaacactagaaa

SEQ ID NO: 508 - DNA, 675 bp, Unknown
  source: /note="Description of Unknown: Mobovirus A sequence"
tattctcccacaaaccttcttgtaactctgttaagccttttacatccatgtaatttaattttctccacctaaaaggatttcccccatggtcctttttggctcgaacaaatgctacatagggtcttgttttctccccctggctctcttgccagggttccataccccaattcctctatttccatgatttttcatcatggtttatttttactgtcttcttattttctgaggtgaccaactcctaagccgactgggtcgcggaagcccggactcctcgcatcactagggtgcgtagcgatgtaggcgaaaatattggttgctagatgcatacatatagtgaattgatactacaccaaactctgttctttttgaaactagctattttctaagtaaggtaggctacgggtgaaaccttaccattgcaggtacgtgaaccgcaacggacatttggccgaagactggtgtacccacgtcagttataggacctcttcaacgttggtggacggcatgtcactgattagttaggctagtgaatttaagttcagggggtatcttttagcttaagcgtgtattctagtaggacttgcagagcctccccacctaggaggatctctgtttatagccccttttccttgttccgttagttttccacacttttacaatatttgatgatttgtt

SEQ ID NO: 509 - DNA, 509 bp, Unknown
  source: /note="Description of Unknown: Burpengary Virus sequence"
ctccccccccttccccttcccgagtaggagattggcatgtatgctctacatgcccgattctctcttgctcactctcttaaatcctggtggcggtctcggattaaacatttatgtcgtatctgggatcgtcttacttggtggtaattcctctgttgcctagggacctccggactgccggattaaaggtctcaacagagggcaatgtacaaggaagtcattatacgctaattaagtatttgatgaatgactagtgtgacagggctgaggaactccccccgggtaaccggtgcctcagcgtccgaaagacacgtggataggatccaccctgttatacccagcacgatgtaatagtcaaatacctctgatttgtgtaggatgtataaattgtgcattgtaaattttgggcgtagagatgctccgaaggtaccccgttttacgggatctgatcggaggctaattacccaatgcgccctaaataacttcatataatttctttttctttattcaaa

SEQ ID NO: 510 - DNA, 675 bp, Hunnivirus sp.
taacgtttggcaagaaccctcacctgtcaattgggaccaccactttcagtgaccccatgcgaagtagtgagagagaataagctttcttacccttcatttgtgaacccttcagtcgaagccgcttggaataagataggaggaaaagttcattctaaatggagtgaaacatgtacttcagaatttctagcacgcgctgggctttcttgcgtgtgacggcactgtcttgccggagctctccacactgacaccccacgcttgtggaccttggtggcagatgacaacactgcagctggaattgagtgtctggtacactctgtgtaacagtgaaaacaatgtgatcacttcggtgagctagtagcctgtggaccaacaactggtaacagttgcctcaggggccaaaagccacggtgtttacagcaccctactggtttgattggagcaatccaagatgtcacagagttagtaattgccaagcagtccgtactggtatcttgacataccgtgcagttttggatagtgaaggatgccctgacggtacccataggtaacaagtgacactatggatctaagcaggggctcactctacgctgctttacagctggctgtgagttaaaaaacgtctagctatccacaacctaggggactaggttttccttttatttagattacaattat

SEQ ID NO: 511 - DNA, 675 bp, Hunnivirus sp.
acagtttttgacaaggaccctcacctgtcaatcgggaccaccactttcagtgaccccgtgcgaagtgttgagagaaagtgagctttcttacccttcatttgtgaacccttcagtcgaagccgcttggaataagatggaaggaaatgttcattctaaatggagtgaaacatatacttaatttccagtgtttagtggtctttccactagacaacggcactgtcttgccggaactctacacaccaacattccacgcttgtgggactcaaatgttggatgacacagttgtagctggaactgagtgtttagtgcactctgtgtaacagtgaaaacaatgtgatcacttcggtgggctagtagcctgtggactaacaactggtaacagttgcctcaggggccaaaagccacggtgttaacagcaccctactagtttgattggagcaatccatgatgttacagagttagtaactgccaaacagattgtactggtatcttggcataccgtgcaacttaggatagtgaaggatgccctggcggtacccataggtaacaagtgacactatggatctaaacaggggctcactctacgttgctttacaactagctgtgagttaaaaaacgtctaactatccacaacctaggggactaggttttcctttttatttttatacacaacta

SEQ ID NO: 512 - DNA, 240 bp, Unknown
  source: /note="Description of Unknown: Ia Io sequence"
ggtgtccgggtgtgtgggatagacccagatgtgcagtggatgcgagcatttgagtcagagtaggagcaagcccaggggcaaagggaccacattgtgtatcccgaatgaaggatcgagatttctctcctcattacccggtgtcttgtcactgttgggggggcccaacagtcttagtcctatactgcctgatagggtcgcggctggccggactcaagtgctatagtcagttgattttcactc

SEQ ID NO: 513 - DNA, 416 bp, Taura Syndrome Virus
ctttaaaagtcgtgcgtggcttcaccacgcacgatcagtactatcagttaaccactcttgaatatgctcaatgaccctattcaacactggtgtctcttagtacattattttagcacttaacgtgcatgagttttgcccatttctttcaaaaaaatgagtattcgaggagacgtcccgctccccgtcttatttcaaccgtagactcgacatctattggtggacatttaattccagtcgccgtaagttgcttctgccccgcgctatattttcttatacttatggttctataggtctggtttaaaacgtaaatagacggcccacaaactatagaacgcgtacccggaacgccaatcccggataagtccctggatatatagatgcaccgcaatataagcctgcagactgtctcatatact

SEQ ID NO: 514 - DNA, 604 bp, Acute bee paralysis virus
cccgtcaaaataacaacttataacacgatgttacccgaagaaaccattttagtgtaacatttaagattagaagtagttcatctaatagagataggcactattagaaggaggccttttctaaaggagccgttagtcagcccagacaagcgcagtactttagaagagagaagttccccgatagcgaccgaaaagacgcgttttccgtgctaactaatttaaatgtgggaacgaatattattattgaaattatgtgagccacgtagcaatcaagtcatgtttttgtcactacgtttactcatctaatgtagataattttgtttaagtacctatttaggtgtcatcccaccagagaagaaataatacgtaccggaacccagagtacaccccttattttaagccttactgggcttctctgttagttagtaatctggcccacgttttgcgttgagtggggtcccaacagtaggaattcgacggacaagtagcaagcgagtcggtaccaattggtttagccttcgaaattactctgggcaggaagttactaaacgagaactttctgcttaaatcccaacgcacaaacaaatagagtaaataaataattata

SEQ ID NO: 515 - DNA, 539 bp, Bovine rhinitis A virus
tttgttttgcggctttgccgttgttcgggttttacctgttttcacacagcaaaacaggccttctagtttcgtgcttaaacgagatcatgctcgaactagaactacatagctggtcactggactcataccacaccttgtggagctttatgggaaaggtggctagtgggctgtggaagtgactctgaccacatgcctctcaagtgtgggaaatcacggatcggtgtagcgacgacaacaggccttgggacaccctctccagtaatggagacccaaggggccaaaagccacgcctcgtgccctgttgttcacaaccccagtgcgacccgtgttagtacctatttgcgagaactgtgtctggacagctaaacacaaccctagtgggagactaaggatgcccaggaggtacccggaggtaacaagtgacactctggatctgacctggggagagagggcttgctttacaggcgcctctctttaaaaagcttctatgtctcatcaggcaccggaggccgggccttttccttttaaaattacactta

SEQ ID NO: 516 - DNA, 608 bp, Bovine rhinitis B virus
ccccccctacttaaagatgtacggttttgctgctttcacagagtaaagcagatagaggttctgaactggcaaactttacctcgaaacacgcccgtttttctgctgtgtctcacagactgtcctgtcacacttgtggcggcttgtgacactgtgaacatagtgagaccgaccaagacaacagtttcaagtgatgaacatcgaacgtctaaactggatccgtaactggacatgttagggcaaggacttcccccctggtaacaggagcctggctggccaaaagccccgctcattgagcctagcatgttgtcgaccctggactgttcagtttagttagtacatggaattcacttgtcacggttcttctgaactcggtctctagtatgacagcctaaggatgccctccaggtaccccggggtaacaagtgacacccgggatctgaggaggggactactttacgtagtttaaaaaacgtctaagctgttatggtgaccagaggctggcacctttcacttttaaaattacactactgactacaattgaagtgataacggttttacaggctttcaaactagttacacaagcactgttttcctgacacacacacttt

SEQ ID NO: 517 - DNA, 576 bp, Equine rhinitis A virus
aatattggcgcgcgcatttgcgcgcccccccccatttcagccccctgtcattgactggtcgaaggcgttcgcaataagactggtcgtcacttggctgttctatcgtttcaggctttagcgcgccctcgcgcggcgggccgtcaagcccgtgcgctgtatagcgccaggtaaccggacagcggcttgctggattttcccggtgccattgctctggatggtgtcaccaagctgacaaatgcggactgaacctcacaaagcgacacacctgtggtagcgctgcccaaaagggagcggaactcccccgccgcgaggcggtcctctctggccaaaagcccagcgttaatagcgccttttgggatgcaggagccccacctgccaggtgtgaagtggagtgagtggatctccaatttggtctgttctgaactacaccatctactgctgtgaagaatgccctggaggcaagctggttacagccctgaccaggggccctgcccgtgactctcgatcggcgcagggtcaaaaattgtctaagcagcagcaggaacgcgggagcgtttcttttccctttgtatcgac

SEQ ID NO: 518 - DNA, 466 bp, Unknown
  source: /note="Description of Unknown: GFTV sequence"
atggggaagggtatgacgtgccccttccttcttcggagaactcgctctagtggtctttccacttctggaaaagagtgagtgcacgtgatcaggaccgtcgaagacgacaaatacctggtgctctatctcatagacgtttcacagctgtagcgacccctcagtagcagcggaagccccctcctggtgacaggagcctctgcggccaaaagccacgtggataagatccactgctgagggcggtgcgaccctagcaccctgtgatgcatactagttgtagcgtgccggactattggtctgtcataagacacctgatagagagaccaagaatgtcctggaggtaccccgcgtgcgggatctgaccaggagaccattgcccaatgctttacaacgggtctatggtttaaaaactgtcgcagtctctccaaaccaagtggtcttggttttcaattactttgaatatttcact

SEQ ID NO: 519 - DNA, 675 bp, Unknown
  source: /note="Description of Unknown: SAFV V13C sequence"
ttttcgacgtggttggaattgccatcatttccgacgaaagtgctatcatgcctccccgattatgtgatgttttctgccctgctgggcggagcattctcgggttgagaaaccttgaatctttttctttggaaccttggttcccccggtctaagccgcttggaatatgacagggttattttcttgatcttatttctacttttgcgggttctatccgtaaaaagggtacgtgctgccccttccttctctggagaattcacacggcggtctttccgtctctcaacaagtgtgaatgcagcatgccggaaacggtgaagaaaacagttttctgtggaaatttagagtgcacatcgaaacagctgtagcgacctcacagtagcagcggactcccctcttggcgacaagagcctctgcggccaaaagccccgtggataagatccactgctgtgagcggtgcaaccccagcaccctggttcgatgatcattctctatggaaccagaaaatggttttctcaagccctccggtagagaagccaagaatgtcctgaaggtaccccgcgtgcgggatctgatcaggagaccaattggcggtgctttacactgtcactttggtttaaaaattgtcacagcttctccaaaccaagtggtcttggttttccaattttgttgaatggcaat

SEQ ID NO: 520 - DNA, 675 bp, Unknown
  source: /note="Description of Unknown: SAV P-113 sequence"
ggagatctaagtcaaccgactccgacgaaactaccatcatgcctccccgattatgtgatgctttctgccctgctgggtggagcatcctcgggttgagaaaaccttcttcctttttccttggaccccggtcccccggtctaagccgcttggaataagacagggttatcttcacctcttccttcttctacttcatagtgttctatactatgaaagggtatgtgtcgccccttccttctttggagaacacgcgcggcggtctttccgtctctcgaaaagcgcgtgtgcgacatgcagagaaccgtgaagaaagcagtttgcggactagctttagtgcccacaagaaaacagctgtagcgaccacacaaaggcagcggaccccccctcctggcaacaggagcctctgcggccaaaagccacgtggataagatccacctttgtgtgcggcacaaccccagtgccctggtttcttggtgacacttcagtgaaaacgcaaatggcgatctgaagcgcctctgtaggaaagccaagaatgtccaggaggtaccccttccctcgggaagggatctgacctggagacacatcacatgtgctttacacctgtgcttgtgtttaaaaattgtcacagctttcccaaaccaagtggtcttggttttcactctttaaactgatttcact

SEQ ID NO: 521 - DNA, 612 bp, Unknown
  source: /note="Description of Unknown: VHEV sequence"
aattccttcttcctttctccttggacctcggtcccccggtctaagccgctcggaatatgacagggttattttcacctcttctctcttctacttcatagtgttctatactatgaaagggtatgtgtcgccccttccttcttggagaacgtgcgtggcggtctttccgtctctcgaaaaacgtgcgtgcgacatgcagagtaacgcaaagaaagcagttcttggtctagctctggtgcccacaagaaaacagctgtagcgaccacacaaaggcagcggaaaccccctcctggtaacaggagcctctgcggccaaaagccacgtggataagatccacctttgtgtgcggtgcaaccccagcaccctggtttcttggtgacaccttagtgaaccctcgaatggcaatctcaagcgcctctgtaggaaagccaagaatgtccaggaggtaccccttcctcatggagggatctgacctggagacacatcacacgtgctatacacttgtgcttgtgtttaaaaattgtcacagctttcccaaaccaagtggtcttggttttcccttaacttcgaaaagtcactatggcctgcaaacatggatacccagacgtgtgccct

SEQ ID NO: 522 - DNA, 675 bp, Unknown
  source: /note="Description of Unknown: TRV NGS910 sequence"
atgcgacgtggttggagattaaaccgactccgacgaaagtgctatcatgcctccccgattatgtgatgttttctgccctgctgggcggagcattctcgggttgatacaccttgaatccttcatccttggacctcaggtcccccggtctaagccgcttggaatacgacagggttattttccaatcttctcctttctactttcatgagtcctattcatgaaaagggtctgtgctgccccttccttcttggagaatctgcgcggcggtctttccgtctctcgaaaagcgcagatgcagcatgctggaaccggtgaagaaaacagttctttgtggaaacttagagcagacatcgaaacagctgtagtgacctcacagtagcagcggaaccccctcctggtaacaggagcctctgcggccaaaagccccgtggataagatccactgctgtgagcggtgcaaccccagcaccctggttcgatggttgttctctgtggaaccagagaatggtctttctcaagccctccagtagagaagccaagaatgtcctgaaggtaccccgcatgcgggatctgatcaggagaccaatcgtcagtgctttacactggcgctttggtttaaaaactgtcacagcttctccaaaccaagtggtcttggttttcacttttatcaaactgtttc

SEQ ID NO: 523 - DNA, 551 bp, Unknown
  source: /note="Description of Unknown: EMCV2 RD1338 sequence"
aaatactggtcgaaaccgcttgggataagaccggggtttgttaatgtctcaatgttattctccacccaattgacgtcttttgtcaattggagggcagtgaaaccttgcccttgcttcttgcagaggattcccagtggtctttccgctctcgacaagggaattcatgatccaccaaaagttgtgaagagagcaggtcccatggaagctttctgacgactgatgatgactgtagcgaccctttgcaggcagcggacccccccacctggtgacaggtgcctctgcggccaaaagccacgtgtttaacagacacctgcaaaggcggcacaaccccagtgcctcatcaaaagtctgatgactgtggaaatagtcaaccggcttttcttaagcaaatttggtgtcggggctgaaggatgcccggaaggtaccacactggttgtgatctgatccggggccacagtacatgtgctttacacatgtagctgcggttaaaaaacgtctaggccccccgaaccacggggacgtggttttcctttgaaaaccacgattacaat

SEQ ID NO: 524 - DNA, 675 bp, Unknown
  source: /note="Description of Unknown: EMCV1 JZ1203 sequence"
gtctgctcgatatcgcaggctgggtccgtgactacccactccccctttcaacgtgaaggctacgatagtgccagggcgggtactgccgtaagtgccaccccaaaacaacaacaaaccccccctaacattactggccgacgccgcttggaataaggccggtgtgcgtttgtctatatgttatttcccaccacattgccgtcttttggcaatgtgtgggcccggaaacctggccctgtcttcttgacgagcattcctaggggtctttcccctctcgccaaaggaatgcaaggtctgttgaatgtcgtgaaggaagcagttcctctggaagcttcttgaagacaaacaacgtctgtagcggccctttgcaggcagcggaaccccccacctggcgacaggtgcctctgcggccaaaagccacgtgtataagatacacctgcaaaggcggcacaaccccagtgccacgttgtgagttggatagttgtggaaagagtcaaatggctctcctcaagcgtattcaacaaggggctgaaggatgcccagaaggtaccccattgtatgggatctgatctggggcctcggtgcacatgctttacatgtgtttagtcgaggttaaaaaacgtctaggccccccgaaccacggggacgtggttttcctttgaaaaacacgatgataat

SEQ ID NO: 525 - DNA, 544 bp, Unknown
  source: /note="Description of Unknown: EMCV1 AnrB-3741 sequence"
atgtggtcgaagccacttggaataagaccggcgtgcgcttgtctatatgttacttccaccacattgccgtcttttggcaatgtgagggcccggaacctggccctgtcttcttgacgaacattcctaggggactttcccctctcgccaaaggaatgtaaggtctgttgaatgtcgtgaaggaagcagttcctctggaagcttcttgaagacaaacagcgtctgtagcgaccctttgcaggcagcggaaccccccacctggtaacaggtgcctctgcggccgaaagccacgtgtataagatacacctgcaaaggcggcacaaccccagtgccacgttgtgcgttggatagttgtggaaagagtcaaatggctttccccaagcgtattcaacaaggggctgaaggatgcccagaaggtaccccactggttgggatctgatctggggcctcggtgcaggtgctttacacctgttgagtcgaggttaaaaaacgtctaggccccccgaaccacggggacgtggttttcctagaaaaccactatgacaat

SEQ ID NO: 526 - DNA, 675 bp, Cosavirus sp.
cgtgctttacacggtttttgaaccccacaccggctgtttggcgcttgcaggacagtaggtatattttctttcatttctcttttctagccgcgtaggttctatctacgcgggcggagtgatactcccgctccttcttggacaggcggcctccacgctctttgtggatcttaaggctgccaagtcactggtgtttgaagtgaagaatggagagacactagggcgtttcatgtggctttgccagggattgtagcgatgctgtgtgtgtgtgcggatttcccctcgtggcgacacgagcctcacaggccaaaagccctgtccgaaaggacccacacagtggggttgccccgacccctcccttcaaagctttgtgtaaacaaacttttgtttagactttcttaagcttctctcacatcaggccccaaagatgtcctgaaggtaccctgtgtatctgaggatgagcaccaccaactacccggacttgtgggacgtgtcccacagacgcatgtggtattccagccccctccttttgaggagggggcttttgctcgctcagcacaggatctgatcaggagattcatctctggtgctttacaccagagcatggatttaaaaattgcccaaggcctggcaaacaacctaggggactaggttttctctattttaaaagatgtcaat

SEQ ID NO: 527 - DNA, 675 bp, Cosavirus sp.
cgtgctttacacggtttttgaaccccacaccggctgtttggcgcttgcaggacagcaggtttattttcttttaactctctctttctagccacacacgatctatgtgtgtgggcggagtgatactcccgttccttcttggacaggcggcctccacgccctttgtggatcttaaggctaccaagtcactggtgttggaaagtgaagagaaaggagttccttgggaactacatgtggcattgacagaggttgtagcgatgctgtgtgtgtgtgcggattacccccgtggcgacacggaccccacaggccaaaagccctgtccgaaaggacccacacagtggagcaaccccagctcccctcttcaatgttttgtgttagcaaccttggtattattttctctcaagcttccaatacaccgggccccaaagatgtcctgaaggtaccccgtgtatctgaggatgagcaccatcaactacccggacttgttctttcgagaacagacgcatgtggtaacccagccccgatcctaaggggtcggggcttttgctcactcagcacaggatctgatcaggagacctcccccccctgctttacagggggcgggggtttaaaaattgcccaaggcctggcaaataacctaggggactaggttttcctttttattttaaagttgtcaat

SEQ ID NO: 528 - DNA, 675 bp, Cosavirus A
ccgtgctttacacggtttttgaaccccacaccggctgtttggcgcttgcaggacagcaggtttattttcttatgctctttatttctagccaacagggttctatcctgttgggcggagtgatactcccgttccttcttggacagattgcctccacgatctttgtggatctcaaggtgatcaagtcactggtaaatagagcgaaggttgaggaaacctgaggaatttccatgtggttttgccaggagttgtagcgatgctgtgtgtgtgtgcggatttcccctcatggcaacatgagcctcacaggccaaaagccctgtccgaaaggacccacacagtggagcaatcccagctccctcctacaaagctttgtgagaatgaactcacgtttattcttctttattctctgtttacatcaggccccaaagatgtcctgaaggtaccttgtgtatctgggcatgagcaccatcaactacccggacttgcatttcggtgcagacacatgtggttacccagcccctctgctttggcagaggggcttttgctcgctcagcacgagatctgatcaggagcccttcccagtgtgctttacacctggcggggggttaaaaattgcccaaggcctggcaaaataacctaggggactaggttttccttttattaacaatgtctgtcatt

SEQ ID NO: 529 - DNA, 660 bp, Malagasivirus B
ctttattttcttatgtaactcttctttttaagttttattttgcctacttgtgagcttatgcgggaccactgtcttagacaaccccacatttgtcatgagtaagtacacgcaaccattacgattactttttaaccgtctgaccttttgataacaactgaagttaggcgtgaaacatgcatttataccaaagtagccccgcatttccccactacggtgggggggctaccctactggctttggaactgtagccattatgtgttgcctggctttcaggatctcacaacacaacagttctctcacaatggaatatgggtgagattgcagtgacatgaacaagtatctagtagtacatagactcaagcctagttgcctgcggaacaacatgtggtaacacatgccccagggtccaaaagacaagggttaacagccccttctaggtgtctgtgtgtgaagaatactttagtagtgttgttatgatctcacctgttagtacagaatgagtatggcttggtgaaggatgtcctacaggtacccattatatggatctgagtaggagaccactagtggtggctttaccgccaggtgagtggtttaaaaagcgtctagccaagccaacagcactagggatagtgctttctatattttatattttcagtgtat

SEQ ID NO: 530 - DNA, 654 bp, Mosavirus sp.
cccccccctcaaattgcaacgatatagctaatggcgagattgagatgctatatcacctcttctaagttatagacctcatctgattgataaggacgtaatttggtcgaaaccgcttggaataagaccgatgcgcgtagtcatgatgatgatgtaagatctaggaacttatccaatctgcttatgtctatgtaagtagaggggcaggcctcattgccctaattctttctaccgagtatctgctagggtttctagcggcttgaatacttggattgagggatacaagatactactgatcgattgtcgattgggaaacttgtagatacttcaaagctaccagtagcgtggactcacagccagcggactacccctcatggtaacatgagcctctgggcccacaaggcacgtcgcaagacctgtgagacggcaaccccagcctagctttgttgaggaaacaagcgataacatgacatgagagaccggaaggattcttgtattgtgagccgaaggatggcctctaggtacctcattttatgagatctgaggaggtgctcttgagttggtgctttacactgacaacacagagttaaaaagcgtctaagctcacccggaaattgggaaatttccgttatttccattttgtttgcaaagtcgttc

SEQ ID NO: 531 - DNA, 654 bp, Unknown
  source: /note="Description of Unknown: SVV sequence"
ctgggccctcatgcccagtccttcctttccccttccggggggtaaaccggctgtgtttgctagaggcacagaggagcaacatccaacctgcttttgtggggaacggtgcggctccaattcctgcgtcgccaaaggtgttagcgcacccaaacggcgcatctaccaatgctattggtgtggtctgcgagttctagcctactcgtttctcccctatccactcactcacgcacaaaaagtgtgctgtaattacaagatttagccctcgcacgagatgtgcgataaccgcaagattgactcaagcgcggaaagcgctgtaaccacatgctgttagtcccttcatggctgcgagatggctatccacctcggatcactgaactggagctcgaccctccttagtaagggaaccgagaggccttcttgcaacaagctccgacacagagtccacgtgattgctaccaccatgagtacatggttctcccctctcgacccaggacttctttttgaatatccacggctcgatccagagggtggggcatgatccccctagcatagcgagctacagcgggaactgtagctaggccttagcgtgccttggatactgcctgatagggcgacggcctagtcgtgtcggttctataggtagcacatacaaat

SEQ ID NO: 532 - DNA, 331 bp, Teschovirus A
actagtccttggacttttgttgtgtttaaacacagaaatttaattacctggccatgaattcattggattaacccttctgaaagacttgctctggcgcgagctaaagcgcaattgtcaccaggtattgcaccagtggtggcgacagggtacagaagagcaagtactcctgaccgggcaatgggactgcattgcatatccctaggcacctattgagatttctctggggcccaccggcgtggagttcctgtatgggaatgcaggactggacttgtgctgcctgacagggtcgcggctggccgtctgtactttgtatagtcagttgaaactcacc

SEQ ID NO: 533 - DNA, 416 bp, Teschovirus B
cttccttttaattcgtaactgataagtgatagtccttggaagctaggtatttgttacgctagttttggattatcttgtgcccaacatttgttttcgaacatatgttgtgtttaaacacagaaatctagtttctttggttatgagtttaatggaatatccttttgaaagacttgccttggcgcgggctagagcgcaattgtcaccaggtattgcaccaatggtggcgacagggtacagaagagcaagtactcctgactgggtaatgggactgcattgcatatccctaggcatctattgagatttctctggagcccaccagcatggagttcctgtatgggaatgcaggactggacttgtgctgcctgacagggtcgcggctggccgtctgtactttgtatagtcagttgaaactcatt

SEQ ID NO: 534 - DNA, 664 bp, Tottorivirus sp.
cccctttacgtaactgcaacttaaagagtaccctactgcattggatgtgtggtaaacttttacgcacacatttgtagtagtgttagttatgttctacctaatgagtatgcatgcacccgtcgaaacacgcttgtgataagataggtgagtccatgtgactaatctcattaagataaataagcaccctacaacgcacggcacgctcgtgtcttccgtgcggggccgggacaacagcggcctaaatcttctaggtgaccaccatgcttttgggactatggcaccactgtggacgtgagtacctggcagtaagtctgtgaaaagatggaaggtgtcccaagctatggggcgtatgcatatagcctgcggaacaaacaacggcgacgttgtccccagggcccaaaaggcacgtggataagatccacctatatgtttaccccatagtgtaagtcactggaagtcctagtaatggatgtctggagtaaggctcacggggtagggcgaaggatgcccagaaggtacccgtaggtaaccttaagagactatggatctgatctggggaccggatggcgccatcaccatgacgtggaggccggtttaaaaaacgtctaagcccgaccaacaacctaggggactaggttttccttttttattcatgtatgacgtt

SEQ ID NO: 535 - DNA, 675 bp, Unknown
  source: /note="Description of Unknown: Posavirus 1 sequence"
acatttccttgcgtgcgcacccgaaaatttattgaacttggcttgaatcataagtaatgcttcttatagcggacactttgagaatataatgcttgtatggattaatgtatactgttttaaataacaaacctagacacgcagttgcgttgatggttgtatcaatcacatataagtgttgaactcgtgttaatcctcgatcgctatatgtttgccgcctacttccaataaaatagattacatgcgcgtcatgcctttgtgggttacctattggcctctgacaaaaacaagtcgtaagatttgtagcttcccggtgtaaaaagctgggcgcggtctggctctcgtagggtggaaaggtccaccaatggctggttgagtgtaagctccggtgtcctggttgtcgcaattccaggcgtcgtaataacctatattgcatctgactctaactcttgtggctctactgtatctagttcttgttctactaactctaataatactactggctctaatactgaaaaacttacatatgttaatatagataatatccttgatcctgatatccctcacgtcactgaagttcgccgaaaacgaatttcagatcatatcattgaatctcaaggatgtacttgctctgaacctactataactcctcatgcgttttcattttctactcttggc

SEQ ID NO: 536 - DNA, 675 bp, Unknown
  source: /note="Description of Unknown: A105-675 sequence"
ccacccacagcaagaatgccatcatctgtcctcacccccatttctcccctccttcccctgcaaccattacgcttactcgcatgtgcattgagtggtgcacgtgttgaacaaacagctacactcacgtgggggcgggttttcccgcccttcggcctctcgcgaggcccacccttccccttcctcccataactacagtgctttggtaggtaagcatcctgatcccccgcggaagctgctcgcgtggcaactgtggggacccagacaggttatcaaaggcacccggtctttccgcctccaggagtatccctgctagtgaattctagtggggctctgcttggtgccaacctcccccaaatgcgcgctgcgggagtgctcttccccaactcaccctagtatcctctcatgtgtgtgcttggtcagcatatctgagacgatgttccgctgtcccagaccagtccagcaatggacgggccagtgtgcgtagtcgtcttccggcttgtccggcgcatgtttggtgaaccggtggggtaaggttggtgtgcccaacgcccgtactttggtgacaactcaagaccacccaggaatgccagggaggtaccccgcctcacggcgggatctgaccctgggctaattgtctacggtggttcttcttgcttccatttctttcttctgttc

SEQ ID NO: 537 - DNA, 675 bp, Unknown
  source: /note="Description of Unknown: A110-675 sequence"
acctttgtgcgcctgttttataccccctcccccaactgtaacttagaagtaacacacaccgatcaacagtcagcgtggcacaccagccacgttttgatcaagcacttctgttaccccggactgagtatcaatagactgctcacgcggttgaaggagaaagcgttcgttatccggccaactacttcgaaaaacctagtaacaccgtggaagttgcagagtgtttcgctcagcactaccccagtgtagatcaggtcgatgagtcaccgcattccccacgggcgaccgtggcggtggctgcgttggcggcctgcccatggggaaacccatgggacgctctaatacagacatggtgcgaagagtctattgagctagttggtagtcctccggcccctgaatgcggctaatcctaactgcggagcacacaccctcaagccagagggcagtgtgtcgtaacgggcaactctgcagcggaaccgactactttgggtgtccgtgtttcattttattcctatactggctgcttatggtgacaattgagagatcgttaccatatagctattggattggccatccggtgactaatagagctattatatatccctttgttgggtttataccacttagcttgaaagaggttaaaacattacaattcattgttaagttgaatacagcaaa

SEQ ID NO: 538 - DNA, 675 bp, Unknown
  source: /note="Description of Unknown: 18-675 sequence"
cccacagcaagaatgccatcatctgtcctcacccccaattttcccttttcttcccctgcaaccattacgcttactcgcatgtgcattgagtggtgcatgtgttgaacaaacagctacactcacatgggggcgggttttcccgccctacggcctctcgcgaggcccaccccttccctccccttataactacagtgctttggtaggtaagcatcctgatcccccgcggaagctgctcacgtggcaactgtggggacccagacaggttatcaaaggcacccggtctttccgccttcaggagtatccctactagtgaattctagcggggctctgcttggtgccaacctcccccaaatgcgcgctgcgggagtgctcttccccaactcaccctagtatcctctcatgtgtgtgcttggtcagcatatctgagacgatgttccgctgtcccagaccagtccagtaatggacgggccagtgcgtgtagtcgtcttccggcttgtccggggcatgtttggtgaaccggtggggtaaggttggtgtgcccaacgcccgtactttggtgacacctcaagaccacccaggaatgccagggaggtaccccacctcacggtgggatctgaccctgggctaattgtctacggtggttcttcttgcttccacttctttcttctgttcacg

SEQ ID NO: 539 - DNA, 675 bp, Unknown
  source: /note="Description of Unknown: A115-675 sequence"
acctttgtgcgcctgttttataccccccccaacctcgaaacttagaagtaaagcaaacccgatcaatagcaggtgcggcgcaccagtcgcatcttgatcaagcacttctgtaaccccggaccgagtatcaatagactgctcacgcggttgaaggagaaaacgttcgttacccggctaactacttcgagaaacccagtagcatcatgaaagttgcagagtgtttcgctcagcactacccccgtgtagatcaggccgatgagtcaccgcacttccccacgggcgaccgtggcggtggctgcgttggcggcctgcctatggggcaacccataggacgctctaatacggacatggtgcgaagagtctattgagctagttagtagtcctccggcccctgaatgcggctaatcctaactgcggagcacatacccttaatccaaagggcagtgtgtcgtaacgggtaactctgcagcggaaccgactactttgggtgtccgtgtttccttttaatttttactggctgcttatggtgacaattgaggaattgttgccatatagctattggattggccatccggtgactaacagagctattgtgttccaatttgttggatttaccccgctcacactcacagtcgtaagaacccttcattacgtgttatttctcaactcaagaaa

SEQ ID NO: 540 - DNA, 675 bp, Unknown
  source: /note="Description of Unknown: A73-675 sequence"
ttactccattcagcttcttcggaacctgttcggaggaattaaacgggcacccatactccccccaccccccttttgtaactaagtatgtgtgctcgtgatcttgactcccacggaacggaccgatccgttggtgaacaaacagctaggtccacatcctcccttcccctgggagggcccccgccctcccacatcctccccccagcctgacgtatcacaggctgtgtgaagcccccgcgaaagctgctcacgtggcaattgtgggtccccccttcatcaagacaccaggtctttcctccttaaggctagccccggcgtgtgaattcacgttgggcaactagtggtgtcactgtgcgctcccaatctcggccgcggagtgctgttccccaagccaaacccctggcccttcactatgtgcctggcaagcatatctgagaaggtgttccgctgtggctgccaacctggtgacaggtgccccagtgtgcgtaaccttcttccgtctccggacggtagtgattggttaagatttggtgtaaggttcatgtgccaacgccctgtgcgggatgaaacctctactgccctaggaatgccaggcaggtaccccacctccgggtgggatctgagcctgggctaattgtctacgggtagtttcatttccaatccttttatgtcggagtc

SEQ ID NO: 541 - DNA, 675 bp, Kobuvirus sp.
ttactccattcagcttcttcggaacctgttcggaggaattaaacgggcacccatacacccccatcccctttctgcaacttaagtatgtgtgctcgtgatcttgactcccacggaatggatcgatccgctggagaacaaactgctagatccacatcctcccttcccctgggaggaccttggtcctcccacatcctccccccagcctgacgtaccacaggctgtgtgaagcccccgcgaaagctgctcacgtggcaattgtgggtccccccttcatcaagacaccaggtctttcctccttaaggctagccccgatgtgtgaattcacattgggcaactagtggtgtcactgtgcgctcccaatctcggccgcggagtgctgttccccaagccaaacccctggcccttcactatgtgcctggcaagcatacctgagaaggtgttccgctgtggctgccagcctggtaacaggtgccccagtgtgcgtaaccttcttccgtcttcggacggtagtgattggttaagatttggtgtaaggtccatgtgccaacgccctgtgcgggatgaaacctctactgccctaggaatgccaggcaggtaccccacccccgggtgggatctgagcctgggctaattgtctacgggtagtttcatttccaattcttttatgtcggagtc

SEQ ID NO: 542 - DNA, 675 bp, Aichivirus sp.
ttactccattcagcttcttcggaacctgttcggaggaattaaacgggcacccatacatccccatcccctttctgtaacttaagtatgtgtgcttgtaatcttgactcccacggaatggatcgatccgctggagaacaaactgctagatccacatcctcccttcccctgggaggaccttggtcctcccacatcctccccccagcctgacgtaccacaggctgtgtgaagcccccgcgaaagctgctcacgtggcaattgtgggtccccccttcatcaagacaccaggtctttcctccttaaggctagccccgatgtgtgaattcacattgggcaactagtggtgtcactgtgcgctcccaatctcggccgcggagtgctgttccccaagccaaacccctggcccttcactatgtgcctggcaagcatatctgagaaggtgttccgctgtggctgccagcctggtaacaggtgccccagtgtgcgtaaccttcttccgtctccggacggtagtgattggttaagatttggtgtaaggttcatgtgccaacgccctgtgcgggatgaaatctctactgccctaggaatgccaggcaggtaccccaccctcgggtgggatctgagcctgggctaattgtctacgggtagtttcatttccaatccttttatgtcggagtc

SEQ ID NO: 543 - DNA, 675 bp, Aichivirus sp.
actccattcagcttcttcggaacctgttcggaggaattaaacgggcacccatacacccccatccccttttttgcaacttaagtatgtgtgctcgtaatcttgactcccacggaatggatcgatccgctggagaacaaactgctagatccacatcctccctcccccctgggaggacctcggtcctcccacatcctccccccagcctgacgtatcacaggctgtgtgaagcccccgcgaaagctgctcacgtggcaattgtgggtccccccttcatcaagacaccaggtctttcctccttaaggctagtcccgatgtgtgaattcacatcgggcaactagtggtgtcactgtgcgctcccaatctcggccgcggagtgctgttccccaagccaaacccctggcccttcactatgtgcctggcaagcatatctgagaaggcgttccgctgtggctgccagcctggtaacaggtgccccagtgtgcgtaaccttcttccgtccccggacggtagtgattggttaagacttggcgtaaggttcatgtgccaacgccctgtgcgggatgaaacctctactgccctaggaatgccaggcaggtaccccaccttcgggtgggatctgagcctgggctaattgtctacgggtagtttcatttctaattctttcatgtcggagtc

SEQ ID NO: 544 - DNA, 675 bp, Aichivirus sp.
ttactccattcagcttcttcggaacctgttcggaggaattaaacgggcacccatacacccccaccccctttttgcaacttaagtatgtgtgctcgtgatcttgactcccacggaatggatcgatccgctggagaacaaactgctagatccacatcctcccttcccttgggaggacctcggtcctcccacatcctccccccagcctgacgtaccacaggctgtgtgaagcccccgcgaaagccgctcacgtggcaattgtgggtccccccttcattaagacaccaggtctttcctccttaaggctagtcccgatgtgtgaattcacattgggcaactagtggtgtcactgtgcgctcccaatctcggccgcggagtgctgttccccaagccaaacccctggcccttcactatgtgcctggcaagcatatctgagaaggtgttccgctgtggctgccagcctggtaacaggtgccccagtgtgcgtaaccttcttccgtcttcggacggtagtgattggttaagatttggcgtaaggttcatgtgccaacgccctgtgcgggatgaaacctctactaccctaggaatgccaggcaggtaccccaccctcgggtgggatctgagcctgggctaattgtctacgggtagtttcatttccaattcttctatgtcggagtc

SEQ ID NO: 545 - DNA, 675 bp, Aichivirus sp.
tactccattcagcttcttcggaacctgttcggaggaattaaacgggcacccatacacccccacccccttttctgcaacttaagtatgtgtgctcgtaatcttgactcccacggaatggatcgatccgctggagaacaaactgctagatccacatcctcccttcccctgggaggaccccggtcctcccacatcctccccccagcctgacgtatcacaggctgtgtgaagtccccgcgaaagctgctcacgtggcaattgtgggtccccccttcatcaagacaccaggtctttcctccttaaggctagccccgatgtgtgaattcacattgggcaactagtggtgtcactgtgcgctcccaatctcggccgcggagtgctgttccccaagccaaacccctggcccttcactatgtgcctggcaagcatatctgagaaggtgttccgctgtggctgccagcctggtaacaggtgccccagtgtgcgtaaccttcttccgtctccggacggtagtgattggttaagatttggtgtaaggttcatgtgccaacgccctgtgcgggatgaaacctctactgccctaggaatgccaggcaggtaccccaccttcgggtgggatctgagcctgggctaattgtctacgggtagtttcatttccaattcttttatgtcggagtc

SEQ ID NO: 546 - DNA, 664 bp, Aichivirus sp.
gcttcttcggaacctgttcggaggaattaaacgggcacccatacacccccacccccttttctgcaacttaagtatgtgtgctcgtaatcttgactcccacggaatggatcgatccgctggagaacaaactgctagatccacatcctcccttcccctgggaggaccccggtcctcccacatcctccccccagcctgacgtatcacaggctgtgtgaagtccccgcgaaagctgctcacgtggcaattgtgggtccccccttcatcaagacaccaggtctttcctccttaaggctagccccgatgtgtgaattcacattgggcaactagtggtgtcactgtgcgctcccaatctcggccgcggagtgctgttccccaagccaaacccctggcccttcactatgtgcctggcaagcatatctgagaaggtgttccgctgtggctgccagcctggtaacaggtgccccagtgtgcgtaaccttcttccgtctccggacggtagtgattggttaagatttggtgtaaggttcatgtgccaacgccctgtgcgggatgaaacctctactgccctaggaatgccaggcaggtaccccaccttcgggtgggatctgagcctgggctaattgtctacgggtagtttcatttccaattcttttatgtcggagtc

SEQ ID NO: 547 - DNA, 675 bp, Aichivirus sp.
tactccattcagcttcttcggaacctgttcggaggaattaaacgggcacccactttcctgtcctctccccttttctgtaactccaagtgtgtgctcgtaatcttgactcccgcggattgaccgctccgctggtgaacaaactgctaggtcatctcctccccacccttgggcgtccttccgggcgtccacaccctccccccagcctgacgtgtcacaggctgtacaaagaccccgcgaaagctgctaacgtggcaattgtgggtcccccctttgtaaaggaaccgagtctttctcccttaaggctagacccctgtgtgaattcacaggtggcaactagtggttccactgcatgctcccgacctcggccgcggagtgctgttccccaagtcgtaacactgaccttcacttatgtgcctggcaagcatatctgagaagatgttccgctgtggctgccaaacctggtaacaggtgccccagtgtgcgtagtcttcttccgtcttcggacggtaggtgttaggtaaagatgcggcgtaaggttcaagtgccaacgccctggaagggatgacccttctactgccctaggaatgccgcgcaggtaccccaggttcgcctgggatctgagcgcgggctaattgtctacgggtagtttcatttccctcttcttccactggcatc

SEQ ID NO: 548 - DNA, 675 bp, Aichivirus sp.
actccattcagcttcttcggaacctgttcggaggaattaaacgggcacccactttcctgtcctctccccctttctgcaactcaagtgtgtgctcgtaatcctgactcccacgggttgaccgccccgttggtgaacaaacagctaggtcattccctccctacccctgggcgccatttcagtggcgttcatatcctccccccagcctgacgtgtcacaggctgtgcaaagtccccgcgaaagctgctcacgtggcaattgtgggtcccccctttgtgaaggaaccgagtctttctcccttaaggctagacccctgtgtgaactcacaggtggcaactagtggttccactgcatgctcccgacctcggccgcggagtgctgttccccaagtcgtgacactgacctccacttatgtgcctggcaagcatatctgagaagatgttccgctgtggctgccaaacctggtaacaggtgccccagtgcgtgtagtcttcttccgtctccggacggtaagtgtgtggtaaagatgcggcgtaaggttcaagtgccaacgccctggaagggatgacccttctactgccctaggaatgccgcgcaggtaccccaggttcgcctgggatctgagcgcgggctaattgtctacgggtagtttcatttccctctcttttcactggcatc

SEQ ID NO: 549 - DNA, 498 bp, Pestivirus sp.
gtataagggttgggaaccttgtaccaagctacctctgccattcagtatttgggagtagaagtagatgtgtttacaaactcacacgtgtgggggcggggatagactgtgccagcggtcgtgtaccagcacctacgcatacgtgtggactgcgaaccaggagagcacctaggtctgacaagctgtgagaacacagtagtcgtcagtgagtcagctggtaaggatcacccacctggatactcacgtggacgagggagtttcccagtcagaaacctacaccagaggaggggtcctctggagacatggatggtctgagtaacagactatctactggggtgtgctgcctgacagggtctcggctgatagcctggctagcagtataaaaatcagttgaattggcatatgagttgtgaacatctagtaaacaatgaaagacaaaaacaaaaaatgagcataataaaaaaattgtacaatccactactcaggtgtggctgcagactt

SEQ ID NO: 550 - DNA, 576 bp, Kobuvirus sp.
tttgaaaagggggtgggggggcctcggccccctcaccctcttttccggtggccattcgcccgggccaccgttactccactccactccttcgggactggtttggaggaacacaacagggcttcccatccctgtttaccctttattccatcatcctttccccaagtttaccctatccacaccccactgactgactcctttggattttgacctcagaatgcctatttgacctcccactcgcctctcccttttcggattgccggtggtgcctggcggaaaaagcacaagtgtgttgcaggctaccaaactcctacccgacaaaggtgcgtgtccgcgtgctgagtaatgggataggagatgcctacaacaggctcgcccatgagtagagcatggactgcggtgcatgtgacttcggtcaccacgggcatagcattgctcacccgtgaatcaagtcatcgagatttctctgacctctgaagtgcactgtggttgcgtggctgggaatccacgcttgaccatgtactgcttgatagagtcgcggctggccgactcatgggttaaagtcagttgacaagacac

SEQ ID NO: 551 - DNA, 675 bp, Kobuvirus sp.
cctacccaagggttacatgggaccatattcctcctcccctgtaactttaagttttgtgcccgtattcttgactccaggcggatgttgtgtcgcccgtcctgtgaacaaacagctagacactttcctcccctccctctgggctgctccggcagtccactccctccccccagcgtaacatgccccgctggagtgatgcacctggaagtcgtggacgtgggttagtaacttcggtgaaaacccactataatgacaactggttgacccccacactcaaaggactcgagtctttctcccttaaggctagcccggccacatgaatttgcagctggcaactagtgagtccaccatgtcccgcaacctcggctgcggagtgctgttccccaagcgtatgccttccttctgtaagagtgcgcctggcaagcacatctgagaagtcgttccgctgcgtcgtgccaacctggcgacaggtgacccagtgtgcgtagacttcttccggattcgtccggctcttctctaggaaacatgcgtgtaaggttcatgtgccaaagccctgcgcgcggtgttcttctactgccctaggaatgtgccgcaggtacccctacttcggtagggatctgagcggtagctaattgtctacgggtagtttcatttccatcttctcttcaggtcgacatc

SEQ ID NO: 552 - DNA, 675 bp, Kobuvirus sp.
gaccttctggtacttcttcgcctgggtcacaaaagcgaagaacctgcctctctaacgccagacgagcggcattaaacttgaacttctggcactctccactctcccttttccctgtccctttccccactgcgctctcaaggtcgcgcaatcctgggactagcccagttttaaaagttcctggcaccctttgcccctctaggcccttaaggtaggaactgaccttgtgctgtgatctcggtgcgggagtgctaccacgtagtcatcgtaagcctcgtttctggttctgccctggcaaggctacagagtaccgtgttccgctgtggatgccatccgggtaaccggacccccagtgtgtgtagcggtatgttcacggtccgccgtgttcaccagattcctgacctggctttgctagaaatggtgtgtgcccaatccctgtgaccagtatcaattacatcacctaggaatgctaggaaggtaccccagtcctgagctgggatctgatcctaggctaattgtctacggtgatgctccttttattttcttacaactgctattgactgtctgattgctgattctgctcttgtgctcttctgctctggctcattctcaagggttctctttgtccaagatcctttggttctctccttgttccacttgccactgccaacgcttgtc

SEQ ID NO: 553 - DNA, 369 bp, Pestivirus sp.
gtatacgcagttagttcatcctgtgtatacagattggagactctaaaaacaacgattcggaataggggcccgcggcgaagaccgaagacaggctaaccatgccgttagtagggctagcaccaaaacgcgggaactagacacttaggagagtggtctggctactctaagaggtgagtacaccttaaccgtcaagggttctactcctcagttgaggactagagatgccctgtggacgggggcatgcccaagagttagcttagccggggcgggggttgttccggtgaaagtagcaatattgaccacactgcctgatagggcggagcaggccccctaggtagtctagtataaaatgtctgctgtacatggcac

SEQ ID NO: 554 - DNA, 399 bp, Pestivirus sp.
tacgcggggtataacgacagtagttcaagtgtcgttatgcatcattggccataacaaattatctaatttggaatagggacctgcgacctgtacgaaggccgagcgtcggtagccattccgactagtaggactagtacaaataggtcaactggttgagcaggtgagtgtgctgcagcggctaagcggtgagtacaccgtattcgtcaacaggtgctactggaaaggatcacccactagcgatgcctgtgtggacgaggacatgtccaagccaatgttatcagtagcgggggtcgttactgagaaagctgcccagaatgggtagttgcacatacagtctgataggatgccggcggatgccctgtattttgaccagtataaatattatccgttgtaaagcat

SEQ ID NO: 555 - DNA, 123 bp, Pestivirus sp.
gcagatatcggtggtggacctgggggttgggctcaccgtgccccttcatggggtagacctcactgcttgatagagtgccggcggatgcctcaggtaagagtataaaatccgttgttcactaac

SEQ ID NO: 556 - DNA, 382 bp, Pestivirus sp.
gtatacgagtttagctcaatcctcgtatacaatattgggcgtcaccaaatatagatttggcataggcaacaccccgatgcgaaggccgaaaagggctaaccatgcccttagtaggactagcaaaaaatcggggactagcccaggtggtgagcttcctggatgaccgaagccctgagtacagggcagtcgtcaacagttcaacacgcagaataggtttgcgtcttgatatgctgtgtggacgagggcatgcccacggtacatcttaacctatccgggggtcggataggcgaaagtccagtattggactgggagtacagcctgatagggtgttgcagagacccatctgataggctagtataaaaaactctgctgtacatggcac

SEQ ID NO: 557 - DNA, 373 bp, Unknown
  source: /note="Description of Unknown: Classical swine fever virus sequence"
gtatacgaggttagttcattctcgtatgcatgattggacaaattaaaatttcaatttggatcagggcctccctccagcgacggccgaactgggctagccatgcccacagtaggactagcaaacggagggactagccgtagtggcgagctccctgggtggtctaagtcctgagtacaggacagtcgtcagtagttcgacgtgagcagaagcccacctcgatatgctatgtggacgagggcatgcccaagacacaccttaaccctagcgggggtcgctagggtgaaatcacaccacgtgatgggagtacgacctgatagggtgctgcagaggcccactattaggctagtataaaaatctctgctgtacatggcac

SEQ ID NO: 558 - DNA, 222 bp, Pegivirus sp.
tcagggttggtaggtcgtaaatcccggtcaccttggtagccactataggtgggtcttaagagaaggttaagattcctcttgtgcctgcggcgagaccgcgcacggtccacaggtgttggccctaccggtgggaataagggcccgacgtcaggctcgtcgttaaaccgagcccgtcacccacctgggcaaacgacgcccacgtacggtccacgtcgcccttca

SEQ ID NO: 559 - DNA, 527 bp, Pegivirus sp.
cccggcactgggtgcaagccccagaaaccgacgcctatttaaacagacgttatgaaccggcgccgacccggcgaccggccaaaaggtggtggatgggtgatgccagggttggtaggtcgtaaatcccggtcatcttggtagccactataggtgggtcttaagggttggtcaaggtccctctggcgcttgtggcgagaaagcgcacggtccacaggtgttggccctaccggtgtgaataagggcccgacgtcaggctcgtcgttaaaccgagcccattacccacctgggcaaacaacgcccacgtacggtccacgtcgccctacaatgtctctcttgaccaataggctttgccggcgagttgacaaggaccagtgggggctgggcgacgggggtcgtataggaagaaaaatgccacccgccctcacccgaaggttcttgggctaccccggctgcaggccgccgcggagctggggtagcccaagaaccttcgggtgagggcgggtggcatttttcttcctataccgatc

SEQ ID NO: 560 - DNA, 402 bp, Pegivirus sp.
tggtcaccttggtagccactataggtgggtcttaagagaaggttaagattcctcttgtgcctgcggcgagaccgcgcacggtccacaggtgttggccctaccggtgtgaataagggcccgacgtcaggctcgtcgttaaaccgagcccatttcccgcctgggcaaacgacgcccacgtacggtccacgtcgcccttttaatgtctctcttgaccaataggttcatccggcgagttgacaaggaccagtgggggccgggggtcacagggatggaccctgggccctgcccttcccggcggggtggggaaagcatggggccacccagctccgcggcggcctgcagccggggtagcccaagaaccttcgggtgagggcgggtggcatttttcttcctataccgatc

SEQ ID NO: 561 - DNA, 531 bp, Unknown
  source: /note="Description of Unknown: Hepatitis GB virus A sequence"
gccgggtggaaggcccggaaccgccccaccacctcaactaggtggtaagggtacgtctatcggtccggctggcccgaaaggcggtggatcctgtgtgttagggttcgtaggtggtaaatcccagcacaggtggtaatcgctatagggcaggcttatcccggtgaccgcttccctggatcctggagcgggtcgtggcggcacggtccacaggagtggggcctccggtgtgaataagccctcgtctggagcatcagacgttaaactgagacgtcccgaagagatcggaacgacgccccacgtatggcaacgccgcttaaaacccttcggggacagctatgcgggttgacaatgccagtggggggccgggcccactattgttgtgggctccgagttcctctagggatggccgaaaggcagccatggggccacccaggcggcgccgtgctacaggcggcaaggggaaaaatccttcgggtgaccccgggtggcattccctcccttagcagcatgagtgtggtggtagctgcaacc

SEQ ID NO: 562 - DNA, 520 bp, Pegivirus sp.
ggggaatctcaccccccgtccggttccggaagaatcggaaaccgacaccctgaccaatcattcttgatcatagagtggatgttagtgaaagccagacgaaagccggcggatgggtggtgacagggttggtaggtcgtaaatcccggccaccctggtacccggtataagttgggcggaagctgactgaagctccgtgctcttttctgtgcgttcttggtgcacggtccacaggtgacgcctataccggtgtgaataataggccgactcgagcggagtcgttaaactgagaacctccatacggatggcaacttggcttgcgtacggggacgccgctaaagtcacagtgggttaagtccggcgggttgacaaccccagcaaggcgagggggtcctattgttggactctgccagttcccggtggaggtaggcatggggtggcccagctccgcggcgcgctacagccggggtagcccaaaatccgaaaggtgagggcgggccacatgtccgaaatttagtcaagc

SEQ ID NO: 563 - DNA, 524 bp, Pegivirus I
agaatggtctaagtggttgccaccgtggtccgaaggggaggaggacctacgctgccagggttggcaggtcgtaaatcccgggtgtaggagatccctccttgttaggactgctggtagctggggggtcggtgaccccctgggcaaccgccaaacccggacgaccgggtggcggctccatgttggcacggtccacaggtgtgaaccctaccggtgtgaataagggttggtggttgcggtccaccttaaacgtagtatgcattgggcttggtaaaacaccgctcgtagtacggaacgccgcctttaaagacacagtaggcgtagccggcgggttgacaatccatacggggggtggggtgtggtcatggatctgtccacaccaccttcatgcggccctctaagcaagccataccggggggaggcgcgcggcaccgcactgccgggcaaggggaagaaccttcgggtgacccccccccaaccaccgtccgatcaatgctaatgttgcgtttaggcgtgacaccggcaca

SEQ ID NO: 564 - DNA, 537 bp, Pegivirus K
agaatggtgtgatccgtcgccgctccagcggaaagcgggcgggatctagtggttagggttgttcgcgtaaatcccacactagtggtacgctcgtataacgtgggagcagccggtggggtcgaccccccacctggcggctgctgagcaccggacgaagcgcggggggtgaacgctaacccgcggcccgggctgccaacgttaggcacgtcttggctggaagacgttaaacacagggccccccctcaaccctgatccgaggccagagaccaaggtacgccgcccttttaaaggcgttactcgtccaataggatctctccggcgggttgtcaaaccttgctggccctggtgatggttacgggagggggtggggcggggagtagaagccccgcccggcatgggggtaccaagctcggcacgcccagcacgcgtggcgtaggggaaaaatccttcgggtgacccctggtaccataaagtaattaacatgagcatgccgctagggtgtgctttttcttccttccttgggaaggcggtggcacc

SEQ ID NO: 565 - DNA, 617 bp, Unknown
  source: /note="Description of Unknown: Theiler's disease-associated virus sequence"
tgataccgtgtcccggtacgacctcgcgcgtccccaagctcgccctgaggggggagcgtaagggcgcgtagtggggtagccccccaaaccgagccaccctagtgagtgactttagaatggttagggagactaccgccttcgctgtttggggacctaatgatccgcgtgccagggttcttcgggtaaatcccggcgcggtgttttgggttcagggcagtaggggcagacgggccagcagtcgctggttcctggtaccaccaccctatccggacgacctccctcacgaaaggtcgccacggtctgtggctcgacgacgcctataattcagtccgaggggcgcagccctcgttaaacttaggcaaggttcctcgccattgatttggccaggggtttaagtgaacgccgcccttttaatgtttaatagggttctttcccggcgggttgacaaacacttccctgggctcttcgttggcctcggttccttgatgcttcggcacccatgagcgcacaggggggggaccctgcgacagtccgccaagaggaaaatccttcgggtgacctcgtgcgcaacccaatcccttcttcttccacatggcgtgtctgtggtgcatgctgtg

SEQ ID NO: 566 - DNA, 349 bp, Pegivirus sp.
ggacttcggtccccctgttactctgcgagccaccgcagagccagggttggtacgcccgaggtgttagaccccggccgaaagctcctaaccatggggttagtaggacgtggtaaatgccactgaggggttggagagctggtagagcgagtaagtcggcgtaaggcccgagtacgggcctcccagcccgggtcagcctaaacctggctgtgatacccggtgcatggagggcgtgtcccaacgctcgatcgctgtagggtgggtccctgcagttgggtgtggctaccctgctcgtactgcttgatagagtcccggcggacggaccagctctcgtcagtccgtggagttgcac

SEQ ID NO: 567 - DNA, 327 bp, Pegivirus sp.; identical to SEQ ID NO: 35

SEQ ID NO: 568 - DNA, 436 bp, Unknown
  source: /note="Description of Unknown: GB virus C/Hepatitis G virus sequence"
cccccggcactgggtgcaagccccagaaaccgacgcctatctaagtagacgcaatgactcggcgccgactcggcgaccggccaaaaggtggtggatgggtgatgacagggttggtaggtcgtaaatcccggtcaccttggtagccactataggtgggtcttaagagaaggttaagattcctcttgtgcctgcggcgagaccgcgcacggtccacaggtgttggccctaccggtgggaataagggcccgacgtcaggctcgtcgttaaaccgagcccgttacccacctgggcaaacgacgcccacgtacggtccacgtcgcccttcaatgtctctcttgaccaataggcgtagccggcgagttgacaaggaccagtgggggccgggggcttggagagggactccaagtcccgcccttcccggtgggccgggaaatgc

SEQ ID NO: 569 - DNA, 393 bp, Pegivirus sp.
agaatggggagttaactcctggcactggcccgaagcatgaactgatcgcggtggcagggttcttcgggtaaatcccggccgcgtgttgtgattgtgttagggcaggtgacagtcggcagggtcgaccccctgcttcaggaccactgtcttcctggacgaccgttgctgaaaaagggccgccacggtctgtagctcgccgacgcttctaattcaggccggaggaccacgctccgtaatcgagcccaagtactcaaaccccagcacccctgggtcacgccctacgccgcccttttaacgcttcggctaatagggtctatccggcgggttgacaaagggcgcagggttacctggtactacgagcttgggtgtccctgggagtaatcccagggtgcc

SEQ ID NO: 570 - DNA, 343 bp, Flavivirus sp.
atataaatcccagtttggttaaacctatttcaaggcttaagttgtttattattttatcgccgctcgtgactataaagttgcctagcggagagagataaagaagaaggagttcaaggctcagggcagggcgcaagttccctggtccctaggccgctcgcaggaaggaggagtgaagaagaagaaagagaaggagaggaccaccgccgaaagaaggcaggtgcctcacaagagggccaaccagcgtgttggaccagtggccaacgccggacggcgtggtggcctgctgggacgcctggggattggatggagtgccttcctacaggaagacatcgttcaagccatc

SEQ ID NO: 571 - DNA, 104 bp, Unknown
  source: /note="Description of Unknown: Bussuquara virus sequence"
agtatttcttctgcgtgagaccattgcgacagttcgtaccggtgagttttgacttaacgcagtgagaaaagttttcgaggaaagacgagaagcgaattctctga

SEQ ID NO: 572 - DNA, 106 bp, Zika virus
agttgttgatctgtgtgagtcagactgcgacagttcgagtctgaagcgagagctaacaacagtatcaacaggtttaatttggatttggaaacgagagtttctggtc

SEQ ID NO: 573 - DNA, 150 bp, Yokose virus
agtaaattttgcgtgctagtcgctgagcgtcagaccgcaaagtgagtttttagtgatctaaagtgaggagttattcttactgtcatcaaacactacaaataaacacgttgaaattatttccggaagaacaactgtccggaatcaaagacg

SEQ ID NO: 574 - DNA, 118 bp, Wesselsbron virus
agtatattctgcgtgctaatcgttcgacgttagtccgtggagtgagcttctattagagtcgttaacacgtttgaataatttctactgaaaggagtagaagaaaggagattcattccca

SEQ ID NO: 575 - DNA, 389 bp, Hepacivirus sp.
acctccgtgctatgcacggtgcgttgtcagcgttttgcgcttgcatgcgctacacgcgtcgtccaacgcggagggattcttccacattaccatgtgtcactccccctatggagggttccaccccgcccacacggaaataggttaaccatacctatagtacgggtgagcgggtcctcctagggcccccccggcaggtcgagggagctgaaattcgtgaatccgtgagtacacggaaatcgcggcttgaacgtcatacgtgaccttcggagccgaaatttgggcgtgccccacgaaggaaggcgggggcggtgttgggccgccgccccctttatcccacggtctgataggatgcttgcgagggcacctgccggtctcgtagaccataggac

SEQ ID NO: 576 - DNA, 445 bp, Hepacivirus B
accacaaacactccagtttgttacactccgctaggaatgctcctggagcaccccccctagcagggcgtgggggatttcccctgcccgtctgcagaagggtggagccaaccaccttagtatgtaggcggcgggactcatgacgctcgcgtgatgacaagcgccaagcttgacttggatggccctgatgggcgttcatgggttcggtggtggtggcgctttaggcagcctccacgcccaccacctcccagatagagcggcggcactgtagggaagaccggggaccggtcactaccaaggacgcagacctctttttgagtatcacgcctccggaagtagttgggcaagcccacctatatgtgttgggatggttggggttagccatccataccgtactgcctgatagggtccttgcgaggggatctgggagtctcgtagaccgtagcac

SEQ ID NO: 577 - DNA, 379 bp, Hepacivirus I
cagggtttcgaccctggcccggatacctatcgccttacgccgaaaggtaacgagtaggagtcgggtccccaggcccttaccgccaccaagccaggtggggaggtatgggagccggggggtgcagctggtagctccatgggggacgccccgtgagcggatgctgcatcgataccgggttagctctctgggagagcggcacttgacaccacgaatccgggaaccggacaatcgccggcgtgggacgcgttgcctccgtggccgagcaatttggcatgcccgtggtgaagagtgatggtgggggggggccccccttccagtaccgtactgcctgatagggtcttgcctcaagcccagagagtcgaggctgaaaaccgccatc

SEQ ID NO: 578 - DNA, 557 bp, Hepacivirus J
gccgctcccgaaagggagtccggcgcgtcatcccactccgaggagtggggtggcgtccccgtgtgccggggaaccatgaagcctaagggcatccacattttagaatgaacttgaagcttcgtttcgctggccggaaagtcctgggttcccatggccagggttccgcaggtgggtaaatcccggtggggttccatccaggatatacggcaggcgggcgtagtccggcggttcggacgacgtgtgggtcgcctacggtggattgttcacaggatgggcactccggtgtgaataggccccgtcagggtgcgctgacgttaaactcaggccttgcctggtgttcggggaggattgcagggccacgccgcctctaagggccgtatggcacagtacttcttcgggcgggttgtcaaggccctccaacgcgacaccagtgcctcggcaggcatggggccacccagctcggcgtcccgcacacagacggcgtaggggaaaatcagcaatgtgaccccgggtggcattttccttctctctacttccatgcatgatcaaccgcaatc

SEQ ID NO: 579 - DNA, 280 bp, Hepacivirus K; identical to SEQ ID NO: 49

SEQ ID NO: 580 - DNA, 675 bp, Unknown
  source: /note="Description of Unknown: Icavirus sequence"
cgaagtttaagctaagcaccctcgggcgttcccggattatgtgatcacatcaatttgatggctggtcaccacgcaacgcctggagagatactcttacttttctcttaagatccccggtcatttgacgcttgtaggatgatagggttattttccactataaatactttcatactcttggatgttctatatccaagacgggaggacctaccccgtaccccttagaggtgagatgccaagaacaggccctttctgttctctcgacaatggcatcataggcaacaagcatcacaccaagattgctaagttttgttaagagttcttcaagctatagggtggctgtagcgaccttctgatgcctgcggatttccccacggagcgatccgtgccacaggggccaaaagccacggctaacgcccatcaggagcggcacttaccccgtgccccacccttgaaacttgaatgttcacactggcttctctcggctttctgaactgtctgcttgttggggccccgaaggatgccctggaggtaccccattttatgggatctgaccaggggacacctcagctctctaagttgctggtgtttaaaaaacgtctaagggcccccaccccttaggtggagggatccacctttcctttattttttaaaactcttttatggtcacaattgttt

SEQ ID NO: 581 - DNA, 113 bp, Unknown
  source: /note="Description of Unknown: Antarctic penguin virus A sequence"
ctaggagactacgcagtgggataagatgactatgatgtcgtacgggcagaagccagtacagtcgaagtcgagaccgacgtcgaggatttgactctgcctgacctagtgccatc

SEQ ID NO: 582 - DNA, 214 bp, Unknown
  source: /note="Description of Unknown: Forest pouched giant rat arterivirus sequence"
tattggatccgcctccgggcaaaggttactttcttgtacctcggcttagccacagggtgaccccttgtacgtaggggccccgacgtagcactggtctgacaacaccttctcggcatttcaccttctgcccgctcttccgggcggtggtgtcaagaagcagcagtgctcttctcttttcttcctgcagttcaccgagccctacggggggtaggtg

SEQ ID NO: 583 - DNA, 561 bp, Avisivirus sp.
cattcccctttccccagccatgggttaaatggcccctcaccaggttcggtgctgtctaggcttccagtaaagaagtcaaccgagcattgaacaaaacctcagtgggtatggtagttaaccccgtccactggacaactttgtcctcttaaaagtggatcaatccaccccaactccccccctagccacctgagccatggtggatagcagtgacgaaactagggaccccaatacctctagtgccaagagaattcccccctcgcgagaggtgctcttgggcccgaaaggctagttggcagggtgaagtgaaggaagctgctagcgtggcaaccttaagcgtagcccgaagctgaccttagaggttaaccctagtggaccactggatgaagctgtggaggtggtggataggaaagttggccacttgtgagtagatgcccagaaggcataaggctgatctggggccagtgactataccgttccggtaaacctggtataaaaaccatgaaagcaagtgggtttaaaatttcttctaattccttcatttcagtagtgataactggcaga

SEQ ID NO: 584 - DNA, 134 bp, Unknown
  source: /note="Description of Unknown: Avian paramyxovirus penguin sequence"
accaaacaaggactagataacccacgtgaccgttaactggaaaataagatgttgtaggggcgacctagttggaattcgaccccggctccgaaacctctaattgtggttattggcagtctagtctacttctaacg

SEQ ID NO: 585 - DNA, 121 bp, Unknown
  source: /note="Description of Unknown: Newcastle disease virus sequence"
accaaacagagaatctgtgaggtacgataaaaggcgaagaagcaatcgagatcgtacgggtagaaggtgtgaaccccgagcgcgaggccgaagctcgaacctgagggaaccttctaccgat

SEQ ID NO: 586 - DNA, 302 bp, Bat Hp-betacoronavirus
ttaagcttcggcttgttgcataggaccggaaaggtactatctaccctaactcttgtagttagactctctaaacgaactttaaaactggttgtgtccttcagtagtctgtatggccattggaggcacaccggtaattatcaaatactaagaagattcatagtacatccttgtctagcttttggttggcagtgagcctacggtttcgtccgtgtcgctcacaattatccacacagtaggtttcgtccgctgtggttgagttgctagtccgttgctgtttcgtcagccatctacaactcgacacc

SEQ ID NO: 587 - DNA, 458 bp, Unknown
  source: /note="Description of Unknown: Basella alba endornavirus sequence"
ggaatatggctaatcggcttattctaatcaaacgcaaaagacttatgacacagaccggacctgaacgaggtgataaaacacctcgttcaggttcaaaacgtagaagattcattcctccgattagaaatacaactacgtctaagcacgatagagatggtatcaagatcggttttagaccacgagaaaatcggcaaatgaaagtacaagttgggtggtttaaattaccaagaacagtaacattcaagaacaacggcaacccgtttgttacctcatttcgtaaattgtttagaagtaacaaagataaattatttaatggtgggaagaacctaagtacagtaccagccagaagtagtgaaatgacagaaatgtttatgttcatgtccacgctagagggccaattgtcaatccaagatcgagatccaaaaataatcaataagtctatatacatgatagaggta

SEQ ID NO: 588 - DNA, 675 bp, Ball python nidovirus
ccccttcacccataggcactaggagaacaggataacccctaacggggcatcctgcctgtgacctttcagattcgctagttagatatcttcacagactctgctaggcttctgacccagtccgttcccaaagtccgttaccgcccgagtagcgcttaggcgcgaaagggacggaagtacctccagtaagcgaaagctgaagtaagggaaatacggcaagactaacttgttagtcttacagtgtggataacctggtagttatccccgacaagagacctgactcgatgtgaaaacatccaactaggttggcttcaaactagctacaggcaggatatcccccaacggggcctccaaggaatcgagaaccaaccctcattccacgtctgtagtaagcaaaaacaggggcgatcttcaccgacacctctcaccacagagcacaccaacctctgtgaagccaatttcctcgtccaaggacaggttattgagggtcaactttcttccgaccagaagaagggatttcctaccaaaagaaaaaccaaatccaccaacaccacaaggtaaaacaacaacttgtgaagccaatacttagtcaaagactaactattgagggtcaactttctcttcaatagagaagggatttcctggtaaaacaaataacaacaactaacatcagcaact

SEQ ID NO: 589 - DNA, 150 bp, Sapelovirus sp.
gacaggtgttttggagggcggatgacgatatctggctggccaccagggaataacggcaaatgtctgatcatacggttcacaagtctaccggcgatagtggttcaacaccatgtgtagcagggattcttgcgtatgtgaaggcgacagtgc

SEQ ID NO: 590 - DNA, 496 bp, Unknown
  source: /note="Description of Unknown: Bat Picornavirus 3 sequence"
taagcggaaagcattcttgtcccccggtcagtaacctataggctgttcccacggctgaaagggtgaacatccgttacccgcctcagtacttcgagaaacctagtacgcctgatgattccaaattggtatgatccggtcaaccccagaccagaaactgtggatgggggtcaccattcctagtatggcaacatacaggtgtccccgcgtgtgtcacaggcccttacgggtgccatttcggatgagtctggccgaagagtctattgagctactgttgatacctccggccccctgaatgcggctaatctcaaccccggagccactgggtggtgaaccaaccacttggtggtcgtaatgagcaattctgggacggaaccgactactttggggtgtccgtgtttcttttgttcatattaaactgttttatggtcacaacacaacttggtacgatttgtgattattcactgctcacttgtcacagtaaatatacacaatcatc

SEQ ID NO: 591 - DNA, 419 bp, Unknown
  source: /note="Description of Unknown: Bat Picornavirus 2 sequence"
gggttttacgaaacccgtatacaccagaccttttctcccctccccctccacctaccttttccccctctttggaccgaaacaaggacacgtaagtggaaacgcgattttatatgtggttggccaccacggaataacggcaattgtctacatgtgggaagtgcaacctccctagccgataacccctgaccgggtgtgtaggataggaaaggtgcccactgtgggcgacaggttatggtagagtggatacctagccaggggcaatgggactgctttgcatatccctaatgaagtattgagatttctctgctcattacccggtgatggttgtgtggggggggccccatacactagatccatactgcctgatagggtcgcggctggccgaccataacctgtatagtcagttgaattcagccaag

SEQ ID NO: 592 - DNA, 410 bp, Unknown
  source: /note="Description of Unknown: Bat Picornavirus 1 sequence"
gaaacccgtatacaccggaccttttctcccctccctctccacttacctttttcccctcttcggcatgaaacaaggattattcaagtggaaacgcgatttaatatgcggctggccaccgcggaataacggcaattgtgtatctgctggaagccaagcctgcctagccgatagcccttgaccgggtgtgtaggatagcccaggaaccagcaatacgcgacaggttatggtagagtagatacctagccaggggcaatgggactgcattgcatatccctaatgaaccattgagatttctctggtcattacccggtgatggttactagaggggggcctctagtactagatctatactgcctgatagggtcgcggctggccgaccatgacctgtatagtcagttgatttgagcaat

SEQ ID NO: 593 - DNA, 675 bp, Iflavirus sp.
acgaatcggtatacgcttcggtacctattgttgcaagttcgttccctattttcgatttgcctgcccgaatttgactcaaacaattgtgacatactatgtctctgtttgaaagcactacacgagtttgcgcccagcatgtatgttttcaagtcttttgtataagtctgcctctatagtggttttctttgaccttaaagccttgtcaaccatcctatatgctgcatcgagacttgatgtcaatctgcctctactacgcaaatgtctagtaattagttataaggttttactattttccctcatttccaattttagtttgtagtgtatgtgagtatcattcttactccgactgttaagagaaaccaatttatagtcgttaaatatgataaatggaatgaatgatggtgtcattttaaaaacactcttctctataggcgtaagcattctcgctcttagagtcgtaaagaagaaatgccgtgtctatcagtatgttatgcgatttattttctgccacgcgcttctagtgcaatctagttgacatacagacattgcctaccactcgcgagggtcgaccggtagtgtaaggagtaagtgatgatttccgcttattctgtaccctttgcctggtgaggacagatcctgactaattttaaatataaatgaacactagcttccaag

SEQ ID NO: 594 - DNA, 210 bp, Unknown
  source: /note="Description of Unknown: Bat dicibavirus sequence"
gtatagcaccggaatggtattttactactccaagtatacgtactaggagttaaaccctgtaatttacaggggatttagtgacttttatccgtaaaagtcgattggacgttaatcggtaacgaggccaagtaccgtgaaccaatttaaaaacgtattttctcatgtggtagaaccaacttggaaatagcatggcatataggttgtttaggg

SEQ ID NO: 595 - DNA, 212 bp, Betacoronavirus sp.
gataaagtgtgaatcgcttccgtagcatcgcaccctcgatctcttgttagatctaatctaatctaaactttataaaaacactaggtccctgctagcctatgcctgagggtttaggcgttgcatactagtgtcttaggaatttgactgataacacttccctgctaacggcgtgttgcactctcagtctaagcctcccacccataggaggtatc

SEQ ID NO: 596 - DNA, 277 bp, Betacoronavirus sp.
atttaagtgaatagcttggctatctcacttcccctcgttctcttgcagaactttgattttaacgaacttaaataaaagccctgttgtttagcgtattgttgcacttgtctggtgggattgtggcattaatttgcctgctcatctaggcagtggacatatgctcaacactgggtataattctaattgaatactatttttcagttagagcgtcgtgtctcttgtacgtctcggtcacaatacacggtttcgtccggtgcgtggcaattcggggcacatc

SEQ ID NO: 597 - DNA, 675 bp, Cardiovirus sp.
tacgatcgctgtacattccactactgccaattagctcccccttcccgttgctcccctctataaggagagccttctcttgcaaaggtgaagccttcacccccggtcgaagccgcttggaataagacagggttattttctcctctcctcggcgcttgcctcttctaagctgaataggttctatctattcaggcggatggtctggtccgttccttcttggacagagtgtgtatctgggttttccggatctcgaccacacactcaccagagctcaggagtgattaagtcaaggcccgatctgcggcgaaaaggaaatgaagtattttgcagctgtagcgacctctcaaggccagcggatttccccacctggtgacaggtgcctctggggccaaaagccacgtgttaatagcacccttgagagcggtggtaccccaccaccctgcaaattatggatttgacttagtaactaaaagattgacttggcatacctcaacctgagcggcggctaaggatgccctgaaggtacccgtgttgaaatcgcttcggcgaccatggatctgatcaggggccctgcctggagtggttctatcccacacagcgtagggttaaaaaacgtctaaccgccccacaaagaccccggcagggatgccggtttcctttttaccaattcttgacact

SEQ ID NO: 598 - DNA, 675 bp, Unknown
  source: /note="Description of Unknown: Breda virus sequence"
atcacctagtacttacaagcgggtcaaaccgccctccggaacggtcataaccccctcccgaacgtgcgcttgacgtgactggtctttcagtctagctttctgagaaatactccggggttgtaacccaccattttgacctttggtcagtttggtaacactccaaccaaacagcatctgacccacctccagcttgctgcaggccatttggaccaaacgggttcagatatcttgtggctaaacctctgacccacctccagtttactgcaggccttttggactaaacgggtacagactctttgtggttagtttttaactacccactgtttagccgccaacctgatttttattgttacaaaattttgtgtttacacattattttcttacggttggcagtttgtttggttgtttgcacagtttttgctgataccaatttttactgtgcttttggtgttttcggctaaggctgtttttcacatacttagtttgcttgaagtaaccttcacaacatctgttttgtttttggtttctaaggtaaagagtttcaggaaaaaacataggcgcccatcttgtggtgtctagttttaattaatctggcaaacaagtatcaagtcatcgactccctttggagtgagacttacgagtaccaattcgcctattttggccatccatataaaa

SEQ ID NO: 599 - DNA, 383 bp, Unknown
  source: /note="Description of Unknown: Bovine viral diarrhea virus 3 sequence"
gtatacgcccagttagttcaggtggacgtgtacgattgggtatcccaaattaataatttggtttagggactaaatcccctggcgaaggccgaaacaggttaaccatacctttagtaggacgagcataatgggggactagtggtggcagtgagctccctggatcaccgaagccccgagtacggggtagtcgtcaatggttcgacgcatcaaggaatgcctcgagatgccatgtggacgagggcgtgcccacggtgtatcttaacccaggcgggggccgcttgggtgaaatagggttgttatacaagcctttgggagtacagcctgatagggtgttgcagagacctgctacaccactagtataaaaactctgctgtacatggcac

SEQ ID NO: 600 - DNA, 537 bp, Bovine rhinitis A virus
ttttgcggctctgccgccgttcgggttttacctgttttcacagagcaaaacaggacctctagtttcgtgcttaaacgagatcatgctcgaactagaactataacgctggtcactggacccgtgccgcgccttgcggatctttgcgggaatggtggctagtgggctgtggaagtgactctaaccacacgcccctcaagtgtgggaaaacacgaactggtgtagcgacgacgataggccttgggacaccctctccagtgatggagacccaaggggccaaaagccacgccttgtgccctgtcgttcacaaccccagtgcagttcgtgccagtacctgcttttgggaagtgtgctttggacagctgaaaacagtcctagtgggagactaaggatgcccaggaggtacccggaggtaacaagtgacactctggatctgacttggggagagcgggtctgctttacagacgccactctttaaaaaacttctatgtctcgtcaggcaccggaggccgggccttttcctttaaaacaatacacttt

SEQ ID NO: 601 - DNA, 248 bp, Unknown
  source: /note="Description of Unknown: Bovine picornavirus isolate TCH6 sequence"
ttggatctgagcaggggccccctttgggttgctttacaactcaactgggggttaaaaaacgtctaacccgacacgccagagggatctggtttccttttatttcttttactcaccactggatgcagattgacgataaacgttgttgtttgtgactattgacttgatctgcttctacgggtttactttcactgttatacttcttgctttgtttggtgttcactgtactttgtctccttctacatttcaca

SEQ ID NO: 602 - DNA, 486 bp, Bovine nidovirus
caccaatagattagtcaagctgtctataggcataaactaacccccaaccccattaccccggggccaggtgggccgccgccttcgggcaaacccgtgcgctggtataatcaaggttcacagccagattcactgccggttagctagtggggcggtagcctggcaaaacccgaagaggttggaaagggaacttcagggtagtttatcctaggctagcgtagctacagttcggtcaagataaccgtcctggtgctagggctagtagagacagtggtaacttggacaagggtccagggccactttagggaataccctacggaaggctaggtccgtaaggaagacccccgcagttgtccgcggttgagcagagctcctgcgtagacaaaaggcaaaaagtggattacattcgcctgcaggaaaaggcaaacgtcgttggagtcggagctaaagtactggacgattgataccacgcctgctgcggtagataaa

SEQ ID NO: 603 - DNA, 293 bp, Hepacivirus sp.
ccatcgacactccaggctcacggattaagttaggttccgccgaagcgggctaaccaggcccctagtaggaggcgcctatcccgtgagccctttccccacggattgagtggagctggagctgggaaggaccgagtacggtccaatcgagaagaaccctgatgaacattccaggcctcttcggtagatttggatatatccaccagtgaaggcggggtcgtgggtacaggccccctagtccacacagcctgatagggtcctgccgcaggatccgtgggtgcggctgtacatgtacc

SEQ ID NO: 604 - DNA, 472 bp, Mitovirus sp.
gccccgccgaccttcctatttatttctaaataggaaggtcccgactagtcggataattcggtttaacgaattatggttagatctattaaagttaaaatagattgaatttctttctcatcctccttattcctatactttgggagtaaatgacaaatgtctatcctcaaaccgaaatggcttaagtgatgaatttgaaagaaaggtaggttttaagaatataaggcatcaatatattatacccttgaatgttaagtgaccacggcgtgacgattagggctatcttaggatagacagccatctaacgcgacagcagtggaaatcagcttagcatctcaagatcatgtataatatatacataaccttacaattataaaaccaaaccaaaacacactataattttatataaattatagaagtatcggacctggacggtacctactattaactgatagtagccaaatgcaggaagctc

SEQ ID NO: 605 - DNA, 315 bp, Mitovirus sp.
ggaacttttcagttccagaagtggctttattaagccttcaaagtttacactttgaacctgcgattaattccccatagtgactcttgttactgtgaattaggaatagttgtagttcaacttctaatgaggtgaacaatataataactcatcttattaaccctatacgtagacaattgtccaaagagacagttggaattctgccaatctggaatgtttggtacgcgtagaagataataagagaccctctattcccctgcctcatgactaagtcatggcccggggtgtaatagagatacttttatatattatacaatc

SEQ ID NO: 606 - DNA, 675 bp, Unknown
  source: /note="Description of Unknown: Canine picodicistrovirus strain 209 sequence"
cgctctttatacaaatctgtcaaccctttgtataactctaagccgaacaattatagctaggctttttattatataacattaattaggcattagcgttgtcgccaatctcttggtaatcctaaggatacctttcctgttgactaagatgaagcgccttcggttaccgatgcccggtgtccacgaagccatcgtggtcggccgcgtcccccacctctcccaacttggactccatgttttcagtaggtgtaatgattagtattattgattctgctcgttcaatgtgtttatcttcacgatctgggacccaacacatgcttcactcatgtttaaatgttggttccctcattttgaagacacccaaaccatagagtgcgagaatgaggatttctacttccattctggtaacagaaatgaattcctgcgtgtgtctcgtaaatggaatctttaagaacttcagataaatcgaacaatacactaatacaagttgttttctaccaacatgttcaatgcggctaatctgaccgtggagctgtgaagcgctcaaacccgagtgttgtatacagtcgtaatgcgtaagtccatgaggaaccgactactgttacctctgttggtgtgtttctcctttcctctcttttattattatttgttattgcaaatactacaactttgatcaac

SEQ ID NO: 607 - DNA, 107 bp, Canine morbillivirus
accagacaaagttggctaaggatagttaaattattgaatattttattaaaaacttagggtcaatgatcctaccttaaagaacaaggctagggttcagacctaccaat

SEQ ID NO: 608 - DNA, 601 bp, Kobuvirus sp.
tttaagtgttgtgcccaatctcttgactcctgctggaaccaccgaccagtagtgtccaaaatgccaggtggaaaatcctcccttcccctctgggcttcatgcccggcatcctccccccagcctgacgtgccacaggctgtgcaaagaccccgcgaaagctgccaaaagtggcaattgtgggtcccccctttgtcaaggcgtcgagtctttctcccttaaggctagtcctgtcagtgaactctgtcgggcaactagtgacgccactgcatgcctccgacctcggccgcggagtgctgccccccaagtcatgcccctgaccacaagttgtgctgtctggcaaacattgtctgtgagaatgttccgctgtggctgccaagcctggtaacaggctgccccagtgtgcgtaattctcatccagacttcggtctggcaacttgctgttaagacatggcgtaaggggcgtgtgccaacgccctggaacgagtgtccactctaataccccgaggaatgctacgcaggtacccctggctcgccagggatctgagcgtaggctaattgtctaagggtattttcatttcccaccctcttcttcttgttcata

SEQ ID NO: 609 - DNA, 291 bp, Alphacoronavirus sp.
cttaagtgtcttatctatctatagatagaaaagtcgctttttagactttgtgtctactcttctcaactaaacgaaatttttgctacggccggcatctctgatgctggagtcgtggcgtaattgaaatttcatttgggttgcaacagtttggaaataagtgctgtgcgtcctagtctaagggttctgtgttctgtcacgggattccattctacaaacgccttactcgaggttctgtctcgtgtttgtgtggaagcaaagttctgtctttgtggaaaccagtaactgttccta

SEQ ID NO: 610 - DNA, 623 bp, Cripavirus sp.
gcaaaatcggtagtacgttaaacgtacgaccaccgatgagactgaaatgacactagttgagattatttcaatatcctagtgttataaagtcaatatttgttggttgatcgtttcgtcaatcgatggcgctgacagccggaaagacggcaataataaaaaccaagatttagtttttaagttttgattgaattgcaaaagctatcttgaatagacaatcaaaatattaagtaaagcaaaagcttcttaaagaagacaatatttaattagttagtaaccaaacctcatcgtgcccctaagggttaaccggttacgtaaaagcgtagaggtattaaggtcactgcggagacctaaaatccgcaattttatgttttgtaatgttttagttatagacttagatgtaactataagagtttataaatacttgtttcaagatttatagacaagatctgatcctatggattttagataaccttcatgttagtggatagtgtgtgtacctatctaaacgcataaggctcttatttcatatttaaagtaggactatgtattacggcgcatctaacggtaacgttagtcaagaccggagaatctcggaatgaattttagtaattcccaaatttata

SEQ ID NO: 611 - DNA, 675 bp, Unknown
  source: /note="Description of Unknown: Human coxsackievirus A2 sequence"
acctttgtgcgcctgttttatatccccaccccgagtaaacgttagaagttacgcaaccccgatcaatagtaggtgtagcactccagctgcatcgagatcaagcacttctgtctccccggaccgagtatcaatagactgctaacgcggttgaaggagaaaacgttcgttacccggccaattacttcgagaagcccagtagtgccgtgaaagttgcggagtgtttcgctcagcacttcccccgtgtagatcaggctgatgagtcaccgcgatccccacaggtgactgtggcggtggctgcgttggcggcctgcctatggggcaacccataggacgctctaatacagacatggtgcgaagagcctattgagctaattggtagtcctccggcccctgaatgcggctaatcctaactgcggagcacatgccctcaaaccagggggtggtgtgtcgtaacgggtaactctgcagcggaaccgactactttgggtgtccgtgtttctttttattcttataatggctgcttatggtgacaattaaagaattgttaccatatagctattggattggccatccggtgactaacaaatcgctcatataccagtttgttggttttgttcccttatcacatacagctcataacaccctcttatatttactacaattgaatagcaagaa

SEQ ID NO: 612 - DNA, 436 bp, Unknown
  source: /note="Description of Unknown: Coronavirus AcCoV-JC34 sequence"
agaaacaagtagtgttttaaaaaccttcaaattagtgcctgtaacatctttgcaatgaaagtagcgctcactagcctctatgcaaagaatgttaaaagaaatacgaagcatttaaagaatacaatctatctaggataggtacaattctcctccccctcttgacttcggtcaactcaactcaactaaacgaaatcccccttgcatggttccgacccgtgtaaggttgtgtatttcgtgcagtcgttgcccttactagtgtaagcgtaacggcatctaggtttgcacgtcttggaggaaacggtgtgtacgtttctagtgtttacgccgtatcggttccggcccgataggtattgcattagacgtcctgggtggttctgcctgcccttgtgtgattcggctgttccgtcagtttggtcacctcacacgtccttaagac

SEQ ID NO: 613 - DNA, 457 bp, Unknown
  source: /note="Description of Unknown: Chicken picornavirus 3 sequence"
gggtatggtggttaaccccgtccactgggcatctttgccctctcagaagtggatcaatccaccccaactccccccctggttacctgagccacagtggactccggtgacgaagctagggaccccaatacctcaagtgccaagagagtccccccctcgcgagaggtgctcttgggcccaaaaggctagttggcagagtgaagtgaaggaagctgctaacgtggtgaccttaagcgtaattcgaagctgacctttgaggttaaccctagtggaccactggaggaatctgtggaggtggtggttaggaaagttggccacttgtgagtagatgcccagaaggcataaggctgatctggggccagtgactataccgttccggtaaacctggtataaaaaccatgaaagcaagtgggtgaaattttctctttttatccttcattcagcagttgatattggcaaa

SEQ ID NO: 614 - DNA, 675 bp, Unknown
  source: /note="Description of Unknown: Chicken picornavirus 1 sequence"
gtggccgacttgcagaacttcctaccgaaccaccacctcacccccataactccttccctctacaccttccgctatggtggttaccactgctttattgccttgactgagaatggccaccccctcgacacctgccccctactgccccaccgcgcaaccttttgcttgtccactcggttggagaggcatgggggccccgttcatatccccagtccagttggtgaccttccccctccccgtccggtagatggtccagagggctttgccgacgccctctatgatgcttgcttgtctttcctccgtcagcgcgagcatgcacttgtcgagcccacggaaacacagcctagcttttgcttctctcaccctgcgtaccctgggcgccttccgctcgagattcgctttgttcgacaccctggcgtccccccaccgctacgtgattttactcgtggcatacaccgccctggcgttcagtacattccactgcctaatttgggtggcctccctcaatctcccgcaccccccattgcgcacgtcatcaccgccgccgctaacgcgatccggcgcggttctcactggcactgtcccctcgtccgccgggtttccactcatggttggcttttcacttattctggttactggtgttccatcctacttcatgatggtcgccatgaccatgac

SEQ ID NO: 615 - DNA, 675 bp, Orivirus sp.
aaaccctcacgagtgcttgtggtaggtcccaggccaatattcttcgtaaggcttggttccaattttccaccactcgtgtttgggttctggcctatggtacccagaggggcggtttgggggaattaactccccctcccctgtggtcctataccaccccacacctctgtgggctttctttactatcttcttgttttccgacttttaaacactaggcaggcgcgcctagtcatacaccgcccggctggtctttccagctcttgtgggcggtgcgcgctggtccatcgtgcccagcgacatagcaccttgtggacacctccgaacgccctcccctgtatggggtggtgcccaggggtttcagtgtggtgacacactccctggggcccgaaaggctagtgtgcaacaggtgaggtacagccagctgcccccgtggctggagggaccaagcttgtgaagcacacctcaccttcttgggggtgggctagtaagtggtgaaagcatagtgtccgtgtcgctggccaacactttgggtcaagtccagccactcagtgagtagatgcccaggaggtacccctagtggatctgacttggggcctgttacttaatgcaggttaaaaactatgaaagctgagtagtgtagcccggctggtggcttctcttccttattcattctatttt

SEQ ID NO: 616 - DNA, 651 bp, Gallivirus sp.
ggttaacttgtttaaccaaggcttccgtgcagggcttgcacgttaggagttcatgttgattcatgctccaatgcccaaaactttgtgtgtttgtttatgtctttcccaaagtttcccccaaggtttcggtactcaaaccttaattcctagtcccatcttttgggccttagtatctaggaaatgtacccgtgccttgacgaacgtaagaaagctgtcttttattgaacggttctaatgaactaagtataactggctcgcgccacctggtgtgtgccgttggaattcccccatggtaacatggtccaacgggcccgaaaggctagtgggcaatcggtcctccaaggaaggggttcccaccccgacctgaacaggatttgatgaagctcacctcccaggctcctaaccccaaggaagtttacttatagtaattagaatttagtatgtaattgctggcaatcttgctagtagtcaggaacgttatgaccaaatgagtagacccccagaaggtaccccattatatgggatctgatctgggcctcatactgtgtgtctccccacatatgaggttaaaaccatgaaagtttggtccaaaatattcttttccttttatcttttctttagtggtgacgccattatatcagcagtttgctg

SEQ ID NO: 617 - DNA, 303 bp, Unknown
  source: /note="Description of Unknown: Chicken calicivirus sequence"
ggtgcatcatcactgaacaccctcgggcagagatgcaagggtggaagtcactcctgccccctggcaacatgcaggtgcccgatcccaagcttagttctgacttcctctcctgggtggtgcaacactccaaggttgatgaacaaacctggagggacctctgggcaacctggtctctcgaggatctccggcgcatctccacagactacctcatgctcccggaacctgagaagaacactgatgcctatgatggctggctgatggtcggcgagatgttgacctttgccggtctcattggctgggagg

SEQ ID NO: 618 - DNA, 524 bp, Unknown
  source: /note="Description of Unknown: Carp picornavirus 1 sequence"
agctacaggaaagagagagataatcacagcacataaatacaactacagaagagagcctttccctgagcactatttacagcaaaccacgctgggaaaagtggtagcatgacccacttacgggttacttagtataggattttaatatcttcgattctttattttcttttcttaactaagttcgcccggactttatccgtgttttattttagtttaagcaaaattgagtaactaagtttttaacctgccaaatggtgagaagtaactctgtgaaaataccatttgtgcatgaaattgtcttgaaaactcttaggcttttggggggtcccactgctgtttggaggactattgacagactctattgtagttgagtagtgactaatgataacgatttgcgtattacgcaatgggctgtacccgttagatttagtatgccggggggaggggtcccactggattgcactatgtaacctgacagggcgtctgccgacgcactacaatgaggataagatcggctgtttttattt

SEQ ID NO: 619 - DNA, 675 bp, Unknown
  source: /note="Description of Unknown: Falcon picornavirus sequence"
cgcttggaataagttgagaggaattatgcatgctagttgtgtttgtttacaactaattgttctaatccaagtgaagctcttcgcttggggcggcacgacacttgccgtaattcttctaccgtccctccacaccttgtggatgaagggccggatgtgtggcctctggctaacccctctctctggggtgatgctactggatgttttactcctagaccaaatcacatgaactcctcttgatccacttcggtggggctatgagcctgcggattaatagctggcgacagctaccccaggggccaaaagccacggtgttagcagcaccctcatagtctgatgcccaagggctgatgttgggagctagtagtgtgtgtctggcctatgtttaggacttctggccaagcgcagaggagtggggctgaaggatgcccagaaggtacccgtaggtaaccttaagagactatggatctgatctggggccccctcacgtggctttaccacgtgttgggggttaaaaaacgtctaggccccaccagcccacgggagtgggctttcccttaaaaagcccaacaatatttatggtgacaattcactgtttcttctttgcaatttttgtattcttggactccttattttttgtttgcttgattttagtggacattcagattcaaatacaaa

SEQ ID NO: 620 - DNA, 675 bp, Unknown
  source: /note="Description of Unknown: Equine rhinitis B virus 1 sequence"
cgacaggcacaggtcgctccgagttctagtagtgtgggaacttgttactactgatgaaacgaggtagtgacactcagtacctgcgaacgaggtcggggccctcccttcttccttcacccaactttcacttttcgttccactttagcaggggtcttctttctatccccctggcggcattggaactagccgtcgcgtcttaacgcgcagccctgaaggccccacaccttgtggatcttgccgtgggtatgtttctggcatgtgtttctcaagcctgcaaccgaagccgaacagccacatgaacagtttgagcgtggtagcgctgtgtgagttggcggtggatccccctcgtggtaacacgagcccccgtggccaaaagcccagtgtttacagcacctctcacatccaggacgaccccatcctggcgctcactcttagtagtatggcttagtacgcattaggtggtaagccgagctctccctcggccttgttctgaatgcacacatgtctaggggctaaggatgtcctacaggtacccgcacgtaaccttcagagagtgcggatctgagtaggagaccgtggtgcactgctttacagatgcagcccggtttaaaaagcgtctatgcccctacagggtagcggtgggccgcgccctttccttttaaaactacttgttct

SEQ ID NO: 621 - DNA, 675 bp, Equine rhinitis A virus
aagggttactgctcgtaatgagagcacatgacattttgccaagatttcctggcaattgtcacgggagagaggagcccgttctcgggcacttttctctcaaacaatgttggcgcgcctcggcgcgccccccctttttcagccccctgtcattgactggtcgaaggcgctcgcaataagactggtcgttgcttggcttttctattgtttcaggctttagcgcgcccttgcgcggcgggccgtcaagcccgtgtgctgtacagcaccaggtaaccggacagcggcttgctggattttcccggtgccattgctctggatggtgtcaccaagctggcagatgcggagtgaaccttacgaagcgacacacctgtggtagcgctgcccagaagggagcggagctcccccgccgcgaggcggtcctctctggccaaaagcccagcgttaatagcgccttctgggatgcaggaaccccacctgccaggtgtgaagtggactaagtggatctccaatttggcctgttctgaactacaccatctactgctgtgaagaatgtcctgaaggcaagctggttacagccctgatcaggagccccgctcgtgactctcgatcgacgcggggtcaaaaactgtctaagcagcagcagaaacgcgggagcgtttctttttcctcatttgtttc

SEQ ID NO: 622 - DNA, 224 bp, Unknown
  source: /note="Description of Unknown: Equine arteritis virus sequence"
gctcgaagtgtgtatggtgccatatacggctcaccaccatatacactgcaagaattactattcttgtgggcccctctcggtaaatcctagagggctttcctctcgttattgcgagattcgtcgttagataacggcaagttccctttcttactatcctattttcatcttgtggcttgacgggtcactgccatcgtcgtcgatctctatcaactacccttgcgact

SEQ ID NO: 623 - DNA, 675 bp, Enterovirus sp.
actctggtatcacggtacctttgcacgcctattttataccccttccccatcgtaacttagaagcaacaaacaaactgcccaatagcagcacaacacccagttgtgttaggggcaagcacttctgtttccccggaagggtctgacggtatgctgtacccacggcagaagtatgacctaccgttaaccggccatgtacttcgagaagcctagtaccattatgaaggttgattgatgttacgctccccagcaaccccagctggtagttctggtcgatgagtctcggcattccccacgggcgaccgtggccgaggctgcgttggcggccagcctacaccatacggtgtaggacgtcaagatactgacatggtgtgaagagcctattgagctacgtggtagtcctccggcccctgaatgcggctaatcctaactccggagcatccgccagtaagcccactggaagggtgtcgtaatgcgaaagtctggagcggaaccgactactttgggtgtccgtgtttcctgttttacttattgtttggctgcttatggtgacaacttatagttatcatcataagctacttggtcttgccaaccggagaattatttggttatttgttggtttcataaacctacagtcgtattttcctgtcttattaattgttctcaaaattaacaaca

SEQ ID NO: 624 - DNA, 675 bp, Enterovirus sp.
taccgctgcaccagtgagctggtacgctagtaccttcgcacggagtagatggcatcccccaccccgtaacttagaagcaaagtacacatctggccaatagtggcgctgcatccagccgcgcaacggtcaagcacttctgtttccccggtccgcaagggtcgttatccgcccagtccactacggaaagcctactaaccattgaagctatcgagaggttgcgctcggccacgaccccggtggtagctctgagtgatggggctcgcaaacacccccgtggtaacacggatgcttgcccgcgcgtgcactcgggttcagcctattggttgttcacctcaacatagtgtaaatggccaagagcctactgtgctggattggttttcctccggagccgtgaatgctgctaatcccaacctccgagcgtgtgcgcacaatccagtgttgctacgtcgtaacgcgtaagttggaggcggaacagactactttcggtactccgtgtttcttttgttttattttgaattttatggtgacaattgctgagatttgcgaattagcgactctaccgctgaacattgccctgtactacctaatcgcatttcacaaaacctcagagataccaagctcttacattgatctgcttgttttcctgaatctcaaatataaattggaacaagcaaa

SEQ ID NO: 625 - DNA, 107 bp, Morbillivirus sp.
accagacaaagctggctaggggtagaataacagataatgataaattatcatacttaggattaatgatcctatcaattggcacaggatttggataaaggttcacagtc

SEQ ID NO: 626 - DNA, 348 bp, Unknown
  source: /note="Description of Unknown: Dianke virus sequence"
tgttttcaaccataatactactactacaagtataaaaccccgtccgtctgtcggagacgctaaactctgaccaccaatctagccacatcagttgcttaaagaacctcttgagacactctcccacttaacatcttttaggaatcttcgatgctacaacaacttggctagtgaacaataaatccgtacaattcacagttgtaagaggccataggtccagactttgaaaggtttgtttctattgttacaaatacttagattaacagaggctatttaatagtgctcatcacgttaacagagtaaccttgtgcaatagtatgagcttgttgtaaaacgtcttgatacgacacc

SEQ ID NO: 627 - DNA, 270 bp, Hepacivirus sp.
cactcaatactacactccgcatttggggagaagcgctggcgttcgcggaaccgcgttaaccatacgcgtagtacgagtgcgacagaccccggtgctactggtggtagcgagacacgagccgaagtctgtggggggaactccacttagagggcatgcccgggcgtaggcttctgagttgggatgggccccaacttggcccctgagtgggggggtgttacgacctgatagggtgcgggctggcgcctaccactttccagtcgtacatgagtc

SEQ ID NO: 628 - DNA, 415 bp, Narnavirus sp.
gcccggggggtgcagtcctgtgaaagggtctgcaccatactatatatgtatatgattacatcccaaaaggcgacttcgttcaggttttaaatctgacgtaggtccagtaaataagcatgtcaaaacatgtaagtttatcctgtaatctactctcataagatgagataagatgatattgcagttcccatgtaaataaatccattatgaattcattcatataaggtagaagtggtaactatggttgaaacattaatataaaacggtcattttgcatgaacgtcattaaggaactggcataccaatgtctatttagtgactatgatatttagagtatcccttatattaattaacaattattccttttagcatatcatccgacaacaaattttaaaagaagaaatattactcattaaaa

SEQ ID NO: 629 - DNA, 675 bp, Torovirus sp.
gtacttacaagcgggttaaaccgccctccggaacggttacaaccccctcccgaacgtgcgcttgacgtgactggttctcagtctggctttctgagaaatactccagggttgtatcccaccatcttgacctctggtcattttggtaacaccataaccaaacaaactctacacacctaacccacctccagcttgctgcaggccttttggactaaacgggtttaggtgttttgtgaccaactcgtctacccacctccagttttactgcaggcctttttggactaaacggctttagacttttgtggttagtttttaactacccactgtttagccgccaacctgattttcattgttgtaaaattttgtgtttatacactattttcatacggttggcagtttgtttggttgtttgcacagtttttgttgataccaatttttactgtgcttttagtgtattctgctaaggctgtattttacatacttagtttggttgaagcaatttttacaacatttatattgtttttgatttctaaggtaaagagtcttaggaaacaccatagacgccattcttgtggtgtctagttccaactaatctggcaaacaagtaccaagtcattgactcactttggagtgagacttacgagtaccaatttgcctatttcggacatccatataaag

SEQ ID NO: 630 - DNA, 675 bp, Foot-and-mouth disease virus
acaagcttgacaccgcctgtcccggcgttaaagggaagtaaccacaagcttacaaccgcctaccccggtgttaatgggatgtaaccacaagatacaccttcacccggaagtaaaacggcaaattcacacagttttgcccgtttttcatgagaaacgggacgtctgcgcacgaaacgcgccgtcgcttgaggaggacttgtacaaacacgatctaaacaggtttccccaactgacatacaccgtgcaatttgaaactccgcctggtctttccaggtctagaggggtaacactttgtactgtgcttgactccacgctcggtccactggcgagtgttagtaacagcactggtgcttcgtagcggagcatggtggccgtgggaactcctccttggtaacaaggacccacggggccgaaagccacgtcctgacggacccaccatgtgtgcaaccccagcacggcaacttttctgtgaaactcactctaaggtgacactgatactggtattcaagtactggtgacaggctaaggatgcccttcaggtaccccgaggtaacacgcgacactcgggatctgagaaggggactggggcttctgtaaaagcgcccagtttaaaaagcttctatgcctggataggtgaccggaggccggcgcctttccattataactactgacttt

SEQ ID NO: 631 - DNA, 310 bp, Unknown
  source: /note="Description of Unknown: Feline infectious peritonitis virus sequence"
acttttaaagtaaagtgagtgtagcgtggctataactcttcttttactttaactagccttgtgctagatttgtcttcggacaccaactcgaactaaacgaaatatttgtctctctatgaaaccatagaagacaagcgttgattatttcaccagtttggcaatcactcctaggaacggggttgagagaacggcgcaccagggttccgtccctgtttggtaagtcgtctagtattagctgcggcggttccgcccgtcgtagttgggtagaccgggttccgtcctgtgatctccctcgccggccgccaggaga

SEQ ID NO: 632 - DNA, 143 bp, Unknown
  source: /note="Description of Unknown: Farmington virus sequence"
acgacgcataagcagagaaacataagagactatgttcatagtcaccctgtattcattattgacttttatgacctattattagacccttcacgggtaaatccttctccttgcagttctcgccaagtacctccaaagtcagaacg

SEQ ID NO: 633 - DNA, 528 bp, Unknown
  source: /note="Description of Unknown: Avian infectious bronchitis virus sequence"
acttaagatagatattaatatatatctattacactagccttgcgctagatttttaacttaacaaaacggacttaaatacctacagctggtcctcataggtgttccattgcagtgcactttagtgccctggatggcacctggccacctgtcaggtttttgttattaaaatcttattgttgctggtatcactgcttgttttgccgtgtctcactttatacatctgttgcttgggctacctagtgtccagcgtcctacgggcgtcgtggctggttcgagtgcgaggaacctctggttcatctagcggtaggcgggtgtgtggaagtagcacttcagacgtaccggttctgttgtgtgaaatacggggtcacctccccccacatacctctaagggcttttgagcctagcgttgggctacgttctcgcataaggtcggctatacgacgtttgtagggggtagtgccaaacaacccctgaggtgacaggttctggtggtgtttagtgagcagacatacaatagacagtgacaac

SEQ ID NO: 634 - DNA, 626 bp, Rhinovirus sp.
ttaaaactgggtgtgggttgttcccacccacaccacccaatgggtgttgtactctgttattccggtaactttgtacgccagtttttccctcccctccccatccttttacgtaacttagaagttttaaatacaagaccaatagtaggcaactctccaggttgtctaaggtcaagcacttctgtttccccggttgatgttgatatgctccaacagggcaaaaacaacagataccgttatccgcaaagtgcctacacagagcttagtaggattctgaaagatctttggttggtcgttcagctgcatacccagcagtagaccttgcagatgaggctggacattccccactggtaacagtggtccagcctgcgtggctgcctgcgcacctctcatgaggtgtgaagccaaagatcggacagggtgtgaagagccgcgtgtgctcactttgagtcctccggcccctgaatgcggctaaccttaaacctgcagccatggctcataagccaatgagtttatggtcgtaacgagtaattgcgggatgggaccgactactttgggtgtccgtgtttcactttttcctttattaattgcttatggtgacaatatatatattgatatatattggcatc

SEQ ID NO: 635 - DNA, 675 bp, Unknown
  source: /note="Description of Unknown: EV22 sequence"
ccttataacccgacttgctgagcttctataggaaaaaaccctttcccagccttggggtggctggtcaataaaaacccccatagtaaccaacacctaagacaatttgatcaaccctatgcctggtccccactattcgaaggcaacttgcaataagaagagtggaacaaggatgcttaaagcatagtgtaaatgatcttttctaacctgtattatgtacagggtggcagatggcgtgccataaatctattagtgggataccacgcttgtggaccttatgcccacacagccatcctctagtaagtttgtaaaatgtctggtgagatgtgggaacttattggaaacaacaatttgcttaatagcatcctagtgccagcggaacaacatctggtaacagatgcctctggggccaaaagccaaggtttgacagacccattaggattggtttcaaaacctgaattgttgtggaagatattcagtacctatcaatctggtagtggtgcaaacactagttgtaaggcccacgaaggatgcccagaaggtacccgcaggtaacaagagacactgtggatctgatctggggccaactacctctatcaggtgagttagttaaaaaacgtctagtgggccaaacccaggggggatccctggtttccttttattgttaatattgacatt

SEQ ID NO: 636 - DNA, 675 bp, Cardiovirus sp.
tccgacgtggttggaattaacatcttttccgacgaaagtgctattatgcctccccgattgtgtgatgctttctgccctgctgggcggagcgtcctcgggttgagaaaccttgaatcttttcctttggagccttggctcccccggtctaagccgcttggaatatgacagggttattttccaaactctttatttctactttcatgggttctatccatgaaaagggtatgtgttgccccttccttctttggagaatctgcgcggcggtctttccgtctctcaacaggcgtggatgcaacatgccggaaacggtgaagaaaacagttttctgtggaaatttagagtggacatcgaaacagctgtagcgacctcacagtagcagcggattcccctcttggcgacaagagcctctgcggccaaaagccccgtggataagatccactgctgtgagcggtgcaaccccagcaccctggttcgatggccattctctatggaaccagaaaatggttttctcaagccctccggtagagaagccaagaatgtcctgaaggtaccccgcgcgcgggatctgatcaggagaccaattggcagtgctttacgctgccactttggtttaaaaactgtcacagcttctccaaaccaagtggtcttggttttccaattttgttgactgacaat

SEQ ID NO: 637 - DNA, 292 bp, Human coronavirus 229E
acttaagtaccttatctatctacagatagaaaagttgctttttagactttgtgtctacttttctcaactaaacgaaatttttgctatggccggcatctttgatgctggagtcgtagtgtaattgaaatttcatttgggttgcaacagtttggaagcaagtgctgtgtgtcctagtctaagggtttcgtgttccgtcacgagattccattctacaaacgccttactcgaggttccgtctcgtgtttgtgtggaagcaaagttctgtctttgtggaaaccagtaactgttccta

SEQ ID NO: 638 - DNA, 282 bp, Unknown
  source: /note="Description of Unknown: Hubei zhaovirus-like virus 1 sequence"
gtgcaggatggcctttcccatcttaagtggtttgtaggatttcgtgggtccataccccccgatttcttggtacgtattccatgcacggagaatacgaccaaaactcttatttcaaaaaatattattttttactcttgtgggctgagtgcgacccaccagttccagcttagcaacctggaagttgttggagatttatggaaccaaattacacatgcgtggagtgccgccactccgtatctgttcactcattacgcgattaagttctgcgacgagacgagcgaa

SEQ ID NO: 639 - DNA, 600 bp, Unknown
  source: /note="Description of Unknown: Hubei tombus-like virus 9 sequence"
ggaccatccaggcaggtgtaggctagtaccctcacctgacctgtcgcgatgtttggctttgtgaggcttgtgggaggatcccttggcccatgcattgctgctgtcatcgtgaaaaatgttgtatgctcgcacctggcgtggaggaaacggcatttgacggatgctaaggaggatttgaaggtcctcaactcccatgccttattacaagtcccctttccttcaagcttcgagcccacgtctgtgacgagcagaggtgaggttggagtcaagaggagtcctattcaagctgttcgcagcaagaaccataaaactttcattgctcaatgggcaagagcggctaaggctcggttctcgtttgcacgacagtgtgagcggagccctgtaaatgtcgcggcccttcatcggtggtttgcatcggagtttaagaaaattggcatgaacttgctccaggtttcgtacgtgatcgatgaggttgttgaacttagtttggaaccaacgtatgagcgtatggtgtccgaaactaagaagcaattccgtcatcgggcacgtatggaatactacaacgagaaaaaatgccttgaaaagatccactaggaacgc

SEQ ID NO: 640 - DNA, 251 bp, Unknown
  source: /note="Description of Unknown: Hubei tombus-like virus 32 sequence"
ttcgggtttacccgcgtaagcggccacactgactggttgtcggtgttgaatttgtataccagatgaggagacgttaccaccgtctcggcagtgctacgtctgggaaaggactgtgatagtggacagtcctaccgtctttagatacattgcgttgtgtatagcccgggagggattaactaatagcaacgcaatgcacacggcggttcggatttgcttgactgatggaaagacatctaagttctaattgaacc

SEQ ID NO: 641 - DNA, 341 bp, Unknown
  source: /note="Description of Unknown: Hubei sobemo-like virus 3 sequence"
gagatgtttgcgtgggccgttgcgctgcgggcggcccacctccctacggggaccgtgagacaccgctggggaaggcccccacccccggccaaggggatcctgccgagaggcaggagaaagaggcccagccctctggggcgcctttaggggtgcctgggagggaagtacccgagccgggcggccggtcgggtgcggctgtgcagttcgaggctaaccgtaaggaaggcctgagctgcctcggcttgtcggaaaggaagacgaaggcacttatcaaggctttcaggaagcaggagcgcaattacagcgcgcgccgtgcggcctggattaaccgcatttggccg

SEQ ID NO: 642 - DNA, 675 bp, Unknown
  source: /note="Description of Unknown: Hubei picorna-like virus 2 sequence"
agcaacttctttctgaaaactagctagagttcgacgatctctctggctaatgacaaataaccaatcaaaaagtcaaatgttcatgtatatatatatttagtagtgacctttatttagaaaaactttagatgatttatcgtcaagttgccctttgtgaagcgatcagctttttatatcgtttcatttttgtatacgtcttaattgacgttgtaagtacgttttgcatacctcacattgaggatagtatcgtttcctgactaagaagttaaactagtctaccaatagcaaccatataggatatagctttgtttttaacaaggtttaatctgatcttatgctcttgcttacggtgttttatgtatagaaaagtttttataaaaactacataattgtcaaaagaaaaagcgttacgtactgacgcatttatgttcacagtgtgacacaaaccttctatattttgattgtaaaataggctttgcctgaccatttatcaaatacaaactgtttcaaacgcctctccgagccatattggccgacgcgaatcgacataacagggtgagtttacagctgcagttgcagccgaggatccacttatttgagagagaattactcttaacgaaattttgaagtcacttctacacagttaagtctgagtaggcgttatccaaacgtaaa

SEQ ID NO: 643 - DNA, 174 bp, Hepacivirus sp.
acatgggggggggctgacagtgagtacactgtgccaagcaggtgctacgctatgcctaggtgctgctgtaggccaaggacatgtcccagtcatcccaggtgagggggggggttcccctcaccgctgccactgcctgatagggtcctgccggagggtctcggtgtccggctgtac

SEQ ID NO: 644 - DNA, 675 bp, Unknown
  source: /note="Description of Unknown: Harrier picornavirus 1 sequence"
gatgtgtgacggtgtaattactttccggatcccactttcctattataactctttcatcccaaggttagggaaagaacctggctcggtaccaccagaccctccgccacgctagtggactctccggagataacggtaccccctttgtagtcacctgtgctggtgaagaaccacctagtattgcttgggtgcgtgccgcctagcttccatttcttctggagcactgtgcaatgaggtttccccacttggtaacaagtgcctcaggtcccgcaaggatactgtggggtggtgtgaccgcagggagctgtctccacggctcctctaatgttacgccgctatccacaggccagtgcgtgtcatcgatcccggatgacagagctagtattgcgaacccccaagtaagaaaagtggctagtaacctgatagctggtgaagagggtgggtcagttgagtagatgccctagaggtacccgaaaggatctgactagggacccgtgactatacattaggtaaaccgggtataaaaaccatgaaaaactgaccacttttcttttaacctcttctttctttttatgtgtgttaagtgttttgagtttggactgtaccttgcccgcctttcttggattttctctatcgctcttcttacacctactgttatcaaggcactctttagagata

SEQ ID NO: 645 - DNA, 500 bp, Kunsagivirus sp.
tttcaaatcggactccggtagttataccggagcccggtttggacgcttgggccgcgttaacagccccccacccctttcccactgactgatttctcggattggactcatttgcattgctaactctgattctggatttccccgtttatgtcgtcgcggtcggaagtgcacgtacttcgacgttgatctgatggcgtttgtttccaggggggaggtggcggcagaaacgcccccgccgtaaacttcggcgggccacgcctgtcaagccactccctggggccgagcgcctgaggtgatacagagagataagcacactgggcgctgacaacgcccgggacctcagtgagaagagcagtagggccgtgtttatgggactccattggatatcccccgcttgtcggaactcacggctactccgggttgggaagcccgcgactggtactgtactgggtgatagcctggtgccttccctctcactgttgtatgaaggctgaaaaccccct

SEQ ID NO: 646 - DNA, 675 bp, Kobuvirus sp.
tatagtttgcctgtttctcgcaccgttaccgctcgttcgggaatgtgaaactggcacccctcctctcccctaccaccctttctccttcgcccccattcataatttacaacgccgcacacagcggcggccgccaagggctagcctggcggttataaaaggaacctgggtctttccctcttcaagccaaaaggtaggttccctgtgtccctgaatgctcggtgaggaatgctgcaccgtaacgctttgtgaagtgtttgcaagttctggcccggcaagcctacagagtgctgtgatccgctgcggacgccatcctggtaacaggacccccagtgtgcgcaacagtatgttcagacttcggtttgttcacttgctttcatggaccattgcgcgaaagtgcgtgcgccatatccctgtacttcaggtgtgcttctctggaccctaggaatgctgcgaaggtaccccgtttcggcgggatctgatcgcaggctaattgtctatgggttcagtttcctttttctttactccacaattgactgcttaactgactctggatcttgtgcttccactgctctttctgctctcaaaacggcttcacttaccaactctcacctttcgaccaacaccatttacacactaacttttttcgactcttctgactcctggcttggtgaagac

SEQ ID NO: 647 - DNA, 608 bp, Kashmir bee virus
tacgtacaattttgacgcttcgttcatgcaacaatgaactcacatgtggcgctcggtagtaaccagaggggcgtcattcccccgtatggagtggagaatataagctaccgactcgagctgtagaataattcagcaacttataacgaacacgaattttagtcgacgaaaccattttagcctttaattctatgatttgattataatgataaacagctcatgtaactgtctaaactacataaatacaactggattacgaacctttaagtaactatcttagatgaagtctagtagtctcccaatatttccgtgaaaagaatgagggacgagatagctctatttaaagacgtgaggctttaaattctgataaatacattacctgagaattcctcctttaggagttagaatttgaaaagattagtacctatacttaatagaatttaaatatgttaataatgctgaagacaagtatttcgattattaacctctatatttctatataaagtatctgtgagtctcagtggacatcacagtaaggtcgcagttaacttgtaatcttttcattcctgtgtcggagcagtggtaatggagccggacgatttcgccaaaac

SEQ ID NO: 648 - DNA, 332 bp, Unknown
  source: /note="Description of Unknown: Jingmen picorna-like virus sequence"
tgtgtttttgtcaagataattgttctgtgattaacagtgattgtggttcgtgtaatgcgacgcagtcaaatgctagttttgatgaagtgtatgagagagtggaaaacttatctcataagaagattgaagagtgtgtagatcaggctattgatcgagcttctaagcttcgtgattacaagcttaatgttcacaatggctcccgacgggaatcatctgatcctctctttatttcgccccattcgttgttatcgcttggggtatctaagtttgttgcgtttgagcagcatcacagtttcgcttcagttgagtctctgaagttgcttgctctgtct

SEQ ID NO: 649 - DNA, 145 bp, Mumps orthorubulavirus
accaaggggaaaatgaagatgggatgttggtagaacaaatagtgtaagaaacagtaagcccggaagtggtgttttgcgatttcgaggccgggctcgatcctcacctttcattgtcgataggggacattttgacactacctggaaa

SEQ ID NO: 650 - DNA, 138 bp, Mosavirus sp.
gaagttgatcatgaacttggttattggtggaacgcacatgaactcccaacaatgatcttgaagacacagcgtggtaacaattaccatgcccttgtggctgcccaagacattgatggctattgggtgatttatgatgac

SEQ ID NO: 651 - DNA, 675 bp, Unknown
  source: /note="Description of Unknown: Miniopterus schreibersii picornavirus 1 sequence"
gttgtcgacccgttgcttggtttaagcatgaggtggattcccccgattatgtctacccgttactatggcgggcggtcgtttcagggtgtttctactgaggactgcaccaagtctttatcttttattctcagatctccggctgtttgacgcttgtaggacagcaggactattttctcttaatctttttctacccactagggtcctatcctagtggagggagggtgccaccccttctctctttagagagtgcgcctggcggtctttccgtctctggaaaaaggagcacatggcatgctacaattggcacaagaaaacaagctttgcggattctttctttgtactagaggaagctgtagcgaccctgtatggcgagcggactcccctctcggcgacgagagcctctcgggccaaaagccaagtgttaatagcacccatacaggcggcagtaccccactgccctttctcaacatacaatgactgatgaaccactgttggtttttctgacacctttgtagtaggattccaaggaatgtcctgaaggtaccctgttagcttacgcgcaggatctgatcaggagtctctttacagtgctgtacactgtgcaagggattaaaaattgtttgaggaatccccgagatagtggtctatctcttcctattttgttttacagacacg

SEQ ID NO: 652 - DNA, 381 bp, Unknown
  source: /note="Description of Unknown: Linda virus sequence"
gtatagcagcagtagctcaaggctgctatacgattggacataccaaattccaattggtgttagggaccacctaggtgaaggccgacgacaggtagccattcctgttagtaggacgaaccgttatggtggactggttgctcaggtgagcaggctgcaatgcgtaagtggtgagtacaccacagccgtcaaaggtgccactggtaaggatcacccactggcgatgccttgtggacgggggcgtgcccaacgcaatgttagcggtggcgggggctgccatcgtgaaagctaggtcttgatggaccttgttgcctgtacagtctgataggatgccggcggatgccctgtgacagccagtataaagaatatccgttgtgattgcac

SEQ ID NO: 653 - DNA, 675 bp, Unknown
  source: /note="Description of Unknown: Lesavirus 2 sequence"
tctttctttattttcttatgtaactcttctttttaagttttattttgcctacttgtgagcttatgcgggaccactgtcttagacaaccccacatttgtcatgagtaagtacacgcaaccattacgattactttttaaccgtctgaccttttgataacaactgaagttaggcgtgaaacatgcatttataccaaagtagccccgcatttccccactacggtgggggggctaccctactggctttggaactgtagccattatgtgttgcctggctttcaggatctcacaacacaacagttctctcacaatggaatatgggtgagattgcagtgacatgaacaagtatctagtagtacatagactcaagcctagttgcctgcggaacaacatgtggtaacacatgccccagggtccaaaagacaagggttaacagccccttctaggtgtctgtgtgtgaagaatactttagtagtgttgttatgatctcacctgttagtacagaatgagtatggcttggtgaaggatgtcctacaggtacccattatatggatctgagtaggagaccactagtggtggctttaccgccaggtgagtggtttaaaaagcgtctagccaagccaacagcactagggatagtgctttctatattttatattttcagtgtatatggtgacaa

SEQ ID NO: 654 - DNA, 675 bp, Unknown
  source: /note="Description of Unknown: Lesavirus 1 sequence"
gtaactaataagcaagttttactgcctgcaaactgcttcaatgggaccaccgcttcggcgacccctttgttgagtttgtatgtttttaagtaatctttgcaaccatacgattattttagccgcctctctataatgatcttgttatagtgggacgtgaaacattggtttttctcacacacgtccggtcacccgggcgtgtgttcttccgtaagtcctatccacataccatcgtgggtaggccagcatgtttgcacaggctgtgacagtgtgggtgggctttccacctctcaacaacacactgaattgcaatgcactcacggaggaaatgacaatttggttatagttttgaactgtgctagtaatttctttcacattaagccatgttgcctgcggaatcacatgtggtaacacatgcctcagggcccaaaaggcacgggttagcagccccttcatggtgtgttagaagtgaaaacacatagtatgagctataatatctttgttgtcttctctgtagtgtaccccgccaaatgtaaggatgcccagcaggtacccattttatggatctgagctggggattgatagtgtatctataaatgcactgatcaatttaaaaagcgtctaagtttggcacaaacactggggacagtgtttttcctttattcttttatttgatta

SEQ ID NO: 655 - DNA, 638 bp, Unknown; identical to SEQ ID NO: 30
  source: /note="Description of Unknown: Phopivirus strain NewEngland sequence"

SEQ ID NO: 656 - DNA, 377 bp, Pestivirus sp.
gtatacgagattagctcatactcgtgtacaaattggacgtagcaaatttaaaaattcggatagggtccccatccagcgacggccgaacggggttaaccatacctctagtaggactagcagacggatggactagccacagtggtgagctccctgggaggtctaagttctgagtacagaacagtcgtcagtagttcaacgctggtaaaccccagccttgagatgctacgtggacgagggcatgcccaagacacaccttaacctggacgggggtcgtccaggtgaaagtacccatctttgggtgctgggagtacagcctgatagggcgctgcagaggcccactgacaggctagtataaaaatctctgctgtacatggaac

SEQ ID NO: 657 - DNA, 494 bp, Unknown
  source: /note="Description of Unknown: Quail picornavirus QPV1 sequence"
tttgcatcagttcgcccctcccctcaccatacctttttcccctctttaggactgatacttggttatgatgagcagaggatttcgcaagttatgcttcttgataaaaagtaattcacgaatcatgggattatagcctggaagtgaacactcatgtggcaagtgggttagtagctctccatgttcccatgtgcagtggactgacaacagtgagttcggggttgtgtagtaaagggaaagtattacttacccgcacctgctatacgtggtgtacgtaggatacgagttagtagtgcttagcaactttaaactggtgctgaaatattgcaaggtcactgaagttgtgaacgcgaacgctccgccactgccatgtatagcgtgcaatgcataaatggtgcactacatgatacgagggaatgggaaaccctccatggccgaatgcagggtgacagcctgccggcggatgcctgttgttagtataatccgttgtttgccac

SEQ ID NO: 658 - DNA, 443 bp, Sapelovirus sp.
acactcatttcccccctccacccttaaggtggttgtatcccctacaccctaccctcccttccacataggacgaataaacggacttgagattaaggcaagtacataaggtatggtttttggatacacttaaatggcagtagcgtggcgagctatggaaaaatcgcaattgtcgatagccatgttagcgacgcgcttcggcgtgctcctttggtgattcggcgactggttacaggagagtagacagtgagctatgggcaaacccctacagtattacttaggggaatgtgcaattgagacttgacgagcgtctctttgagatgtggcgcatgctcttggcattaccatagtgagcttccaggttgggaaacctggactgggtctatactgcctgatagggtcgcggctggccgcctgtaactagtatagtcagttgaaaacccccc

SEQ ID NO: 659 - DNA, 189 bp, Unknown
  source: /note="Description of Unknown: Porcine reproductive and respiratory syndrome virus 2 sequence"
atgacgtataggtgttggctctatgccttggcatttgtattgtcaggagctgtgaccattggcacagcccaaaacttgctgcacagaaacacccttctgtgatagcctccttcaggggagcttagggtttgtccctagcaccttgcttccggagttgcactgctttacggtctctccacccctttaacc

SEQ ID NO: 660 - DNA, 675 bp, Enterovirus sp.
gaaccttagaagtttacacaaacaaagaccaataggagtccaacacccagttggattgcggtcaagcacttctgtttccccggacctagtagtgataggctgtacccacggccgaagatgaacccgtccgttatccggctacctacttcgggaagcctagtaacattctgaagtctctgaggcgtttcgctcagcacgaccccggtgtagatcgggctgatgggtctccgcataccccacgggcgaccgtggcggaggccgcgttggcggcccgcctatggcgaaagccataggacgcctcttagatgacagggtgtgaagagcctactgagctgggtagtagtcctccggcccctgaatgcggctaatcctaaccacggagcgtccaccagcaatccagctggcagggcgtcgtaacgggcaactctgtggcggaaccgactactttgggtgtccgtgtttccttttgatcctattttggctgcttatggtgacaacgataagttgttatcataaagctcttgggttggccacctggaaaaagttatcagtgtttgatattgttcggctctcacgcctaccaataagacaagccctatatttacttgttgcattttactcgtcagaagaaatcacagagtatcatttggatttgttactcacattaaggacaag

SEQ ID NO: 661 - DNA, 591 bp, Unknown
  source: /note="Description of Unknown: Pigeon picornavirus B sequence"
tttatttagctgttaagttttatttgtgccgagaccccatagtaggatcttggtgttccacattaagctctcccgaccacacatccaaacgataggcggtgtaagggctccctggctaagtgtttactcattgctagggaagtgttgcgacccgttaccagtaggaatacaggaggtcttagttgcctaaccagataaagtggtgctgaaatattgcaagctcaatgtctggcgaacgacggactaccgttgaactattgttaacgcccgcgtgtgtaggcaacacacgggttagtaggtcacttacattgacatccgtgccgggaaagcggatctgagctatcgattgcctgatagggtgccggcgggcgcggtacgtgtggtatagtccgctgtcttggggtatggcgtctactcggttttgttgtcgttttggaatgtcccatgtcggagatgtcgttaccggtgtttgctttacttgtgcacgaataagaaaacagagtttggagttttggaagttaatggataacatcaagtttccattgcgttcctcgtgcattttaggccagaaaatcgaccacaaaatcgaga

SEQ ID NO: 662 - DNA, 620 bp, Unknown
  source: /note="Description of Unknown: Picornavirus HK21 sequence"
aaacgggaggatcggctttggcttatcctcttaatagtctacaaaactgggctgactggtgggggagctactagatccgggagaggactagttaccccgcgtaacttccctttttgtcactccctccacctaccccttccctgtcccttagactcttaagtaggtgtgcaggcctggccccccggaaatgggcaaatcggacgtttgcgtgtagggtcgttctgaaaggtggggcccactccaccgtagtaggatcttcctgtttcacgtttaaacctctccgggcaggtatcgctagacactaggctgtataggatggcacgcacttaggtttcgcaccttcctagtgcgccaagatcccgcttttgagctcaagtacatggttctttgtaagatgtctaaccagaggaggtggtgctgaaatattgcaagccactctggcgaacgtccactgcattgcctggaacaggctctctagcgccctccactggtagcgcggtggtgggttagtaggatacctatatggacaggggatgcgggaatacccctcactagctagtgactggttgatcgactggcggcggatccagtgatacttgcataatccgcagacttgggag

SEQ ID NO: 663 - DNA, 675 bp, Unknown
  source: /note="Description of Unknown: Picornavirales Tottori-HG1 sequence"
agccatgaactagtgtgcgattcccacagtgttggtcgaaagccccgcactgtctactcgcatatttgactccagtccttccgcagccagcggttaggttctggttaaagtgcattatgtgcacggcgccacgcagaactgccagaaatggtaagctgcgcccaacgccaacggtttgtgtatcccgttagtcacacgtttacagctgttcgttaacagtagggttttgtcgacccggaccccttaatgcgcgcgaattcaaccgcgcctagtcggcaatggtatcatttaatcccatgcactacgggagaaatttgagaccaaagaattcctgagggccactgcttgctctaagtgcaatgcctcgggagacttctgtcaggagcctagcggctttcaaccgcgacagctaactcctgcgggatgtttggtgtccatacttactggcgtcctcacaacgctaagtggatgttgtccacaggtaggcaaacaccgagccccacattcaggagacctgtatgaacgatcctatcagcattagagttggaattgggtgtgctaacgtccgcataagtgcaccccgtggtaacgctgggaaactatccagcgcaacgtactgtcctcaatgtctagggaaggaccgccctaagcgtacaaccgggccatgtgtcgagc

SEQ ID NO: 664 - DNA, 549 bp, Hepatovirus sp.
ttcaaagaggggtccgggattttcctggtccccctctttgggcacccttggctcgggggtgtgaataccgtgctcgcgtttgccgtgcgttaacggcttcatttatgtttgtttgtctgttttattatgttggtttgtctgtttgttatgttggtattgttcgtgtttaatgttatgaccacattacactccagccaatgaagaacagatggtgcggttattgctggcggaattcctaacgtcctggatccgttggtacgcatcacaaaacaatttgcagagagagtggtgaaacggcttgggaatccctgagtacagggaaatcacactgatagctcatcttggctgttttcagtcatggaccttatgcagtgtaatttgggtgtaccccccatagcttaggaggaatgttctgtcttggcactagagtgggacgctgatgcctccgtgtctaggatggtctaagggacagaatggggtgcctctgatgccatactacctgatagggtgctctcacggcctctgcatcttagtgagaagttcaatttt

SEQ ID NO: 665 - DNA, 107 bp, Unknown
  source: /note="Description of Unknown: Rinderpest virus sequence"
accaaacaaagttgggtaaggatcggtctatcaatgattatgatttagcacacttaggattcaagatcctatcgactggagcaggcttaaggtaaaggttctttaaa

SEQ ID NO: 666 - DNA, 675 bp, Rabovirus A
ctacggatatttgcatgacccgctttctatcgccccaacaatcccctttgtaaccacaagctttactcaggctagcagcccgactagctgtttggaagaaaaggctagggcacacaccaacaacaccgaccccactggtcgaaggccgcttggcaataagactggtggaacagggtcgcctgtagttgtttggaacattctttctaatgactttgtcagcggtgctactcacaccgtaactcttctaccctatccccacgcttgtggaactaggaggggatgagtgattcaagtaagtactgtcagaatggtgaaaatgatctgattctgaaacgctatggatccatcgaaagatggggctacacgcctgcggaacaacacatggtaacatgtgccccaggggccgaaagccacggtgataggatcacccgtgtagtttgagatcatatcaatgttcatagtctagtaagatgatttgaaatctaactgagctgatggctaactgcttgtcttattgcggcctaaggatgtcctgcaggtacctttagataaccttaagagactattgatctgagcaggagccaaagtggtctttcccagctttggttaaaaaacgtctaagccgcggcagggggcgggaggccccctttcctcccaaaacttaatattgattgt

SEQ ID NO: 667 - DNA, 410 bp, Shingleback nidovirus 1
ctgtgagtaccgacaggctcgaagtctattatgaggcgtcgaaacagaaaacctgtaacaactccggtttcatctatcactgccgtcaagaggcagaagaggacgaccacgtgtcaccagatcacttgtatctgtttcagtcaggaagtcaacttttcgacgaagttcgaccattcatcgacccgctgaaaagcgtagaagtcgatgaagatgagctccaaagagccatcgccgatttcgacaaccaaagtgactgtttccactccttcgagctcgtgaatttcgagctgaaacaacaaatcaacgagaacgagtggtacggttattataattacgacaaccaaaactgcaaagttcagttgccagtcacatgtcgaatcgaggacgtaacctgggatcaggtttacgtg

SEQ ID NO: 668 - DNA, 666 bp, Unknown
  source: /note="Description of Unknown: Seneca valley virus sequence"
tttgaaatggggggctgggccctgatgcccagtccttcctttccccttccggggggttaaccggctgtgtttgctagaggcacagaggggcaacatccaacctgcttttgcggggaacggtgcggctccgattcctgcgtcgccaaaggtgttagcgcacccaaacggcgcacctaccaatgttattggtgtggtctgcgagttctagcctactcgtttctcccccgaccattcactcacccacgaaaagtgtgttgtaaccataagatttaacccccgcacgggatgtgcgataaccgtaagactggctcaagcgcggaaagcgctgtaaccacatgctgttagtccctttatggctgcaagatggctacccacctcggatcactgaactggagctcgaccctccttagtaagggaaccgagaggccttcgtgcaacaagctccgacacagagtccacgtgactgctaccaccatgagtacatggttctcccctctcgacccaggacttctttttgaatatccacggctcgatccagagggtggggcatgacccctagcatagcgagctacagcgggaactgtagctaggccttagcgtgccttggatactgcctgatagggcgacggcctagtcgtgtcggttctataggtagcacatacaaat

SEQ ID NO: 669 - DNA, 675 bp, Unknown
  source: /note="Description of Unknown: Sclerotinia sclerotiorum dsRNA mycovirus-L sequence"
ttgaattaatcttttacgtttacgcgcataaaatcaggacacatctcttgtatactttagtatatcaatgatgtttttgttttatgcgattaatcgtaagagaacttctttccatccgcctgtatgggcgggataataagttcaccgccttggtcgaggcgcaaacttgtatgtgcaaaggtgagctatatgctcgaaatagtcgtaactaacacacagccactacctgtagagctctattgatccggaatcctttagtgggaatgcagagctcacaccggacctgcgggtatcttcggcgttagggacttctgtttcagccttgaatcatttacctttataccttctctgaggcgcctgggccgggcgcgatattaagtacaagtcaaggacatcgcgggtagtggtctaatcagccgctagtcctgctggagagttccaacttagttgggtgtggtgcatactagctggatagagtaggtatgtattgctaacgtatgccggaggctatccgtcctcggtagaacgtgccgaggagtagtctctgcagacccccgaacgcgtggggtctttacttaaatgtaggcggagggagcgctcgtaggtggaacgactgcctcccagtcgaatgcaagattttgcacgcggaccagtctgcccggcaattcccgggtg

SEQ ID NO: 670 - DNA, 675 bp, Enterovirus sp.
ctccggcacagccgcaccagtgcactggtacgctagtaccttttcacggggtagtcggtatccccccccgtaacttagaagcatgtaacaaaccgaccaataggtgcgcggcagccagctgcgttgcggtcaagcacttctgtctccccggtccgcaaggatcgttacccgcccactccactacgaggagcctagtaactggccaagtgattgcggagttgcgttcagccacaaccccagtggtagctctggaagatggggctcgcacatcccccgtggtaacacggttgcttgcccgcgtgtgcttccgggttcagtctccgactgttcacttcaacatcacgcaaccagccaagagccgattgtgctggagtggtcttcctccggggccgtgaatgctgctaatcctaacctccgagcgtgtgcgcacaatccagtgttgctacgtcgtaacgcgtaagttggaggcggaacagactactttcggcaccccgtgtttcctttattttattcttattttatggtgacaattgcagagatttgtgatattgcgactttaccgttaaacatagcactgcattacctggttgcattccacaaaacttcagagattcctagttcctacattgacctacttgtttatttgaatcttaaatacaaacttgagcaagtgaa

SEQ ID NO: 671 - DNA, 245 bp, Unknown
  source: /note="Description of Unknown: Wobbly possum disease virus sequence"
cggctgtgagtgcttagcatatgctagagtactacagccgggtgttggagtcatatgcactggttgcctgtataatagtcgggatctgtctgacctacattatctttgggagttgcttatcacgacaattctcgaagtgtctgtcgacagcttacccccgattcgacaaggccccttgtccaccgcagacctatcgattttcaacgagaacactatcagaggtttaaatttaaaactcaccaaca

SEQ ID NO: 672 - DNA, 631 bp, Avian orthoreovirus
gctttttcaatcccttgtgtcgatgttcccgtatgtcatctggttcatgtaacggtgcaacttctatttttggtaacgttcactgtcaggcagcgcaaaactcggcgggtggtgatcttcaagcgacttcctctcttgttgcttattggccctacttggctgcgggcggtggtctgctcgttgttattattataattgttggcgctgtttgttgttgcaaggctaaggttaaagcggacgcagcccgaaacgttttctaccgagagctgttcgcacttaattcgggtaaaagtgatgcaggacctccgatttaccaggtttagtgtacgacgatttgagttttcacctttcgtcttagaggagtgcactactccatctttcacgactataactaataccgatccggctctctactttaacattgagtttccgtcaagtcatcgtctctcccccttcattccagaactgttgtctcagccttgtaccgttcacgtttcattgattcggagattcgctctctgtgcaaccttatctagtatttgtgaatacgactgtgcgctactgccatccatcaacgctattacgacgatccctacaccaggtgcgtcatcatctctgattgttcattggg

SEQ ID NO: 673 - DNA, 665 bp, Kobuvirus sp.
ggggcctcggccccctcaccctcttttccggtggccacgcccgggccaccgatacttcccttcactccttcgggactgttggggaggaacacaacagggctcccctgttttcccattccttcccccttttcccaaccccaaccgccgtatctggtggcggcaagacacacgggtctttccctctaaagcacaattgtgtgtgtgtcccaggtcctcctgcgtacggtgcgggagtgctcccacccaactgttgtaagcctgtccaacgcgtcgtcctggcaagactatgacgtcgcatgttccgctgcggatgccgaccgggtaaccggttccccagtgtgtgtagtgcgatcttccaggtcctcctggttggcgttgtccagaaactgcttcaggtaagtggggtgtgcccaatccctacaaaggttgattctttcaccaccttaggaatgctccggaggtaccccagcaacagctgggatctgaccggaggctaattgtctacgggtggtgtttcctttttcttttcacacaactctactgctgacaactcactgactatccacttgctctcttgtgcctttctgctctggttcaagttccttgattgtttttgactgcttttcactgcttttcttctcacaatccttgctcagttcaaagtc

SEQ ID NO: 674 - DNA, 655 bp, Kobuvirus sp.
ccccctcaccctcttttccggtggccacgcccgggccaccgatacttcccttcactccttcgggactgttggggaggaacacaacagggctcccctgttttcccattccttcccccttttcccaaccccaaccgccgtatctggtggcggcaagacacacgggtctttccctctaaagcacaattgtgtgtgtgtcccaggtcctcctgcgtacggtgcgggagtgctcccacccaactgttgtaagcctgtccaacgcgtcgtcctggcaagactatgacgtcgcatgttccgctgcggatgccgaccgggtaaccggttccccagtgtgtgtagtgcgatcttccaggtcctcctggttggcgttgtccagaaactgcttcaggtaagtggggtgtgcccaatccctacaaaggttgattctttcaccaccttaggaatgctccggaggtaccccagcaacagctgggatctgaccggaggctaattgtctacgggtggtgtttcctttttcttttcacacaactctactgctgacaactcactgactatccacttgctctcttgtgcctttctgctctggttcaagttccttgattgtttttgactgcttttcactgcttttcttctcacaatccttgctcagttcaaagtc

SEQ ID NO: 675 - DNA, 645 bp, Kobuvirus sp.
ctcttttccggtggccacgcccgggccaccgatacttcccttcactccttcgggactgttggggaggaacacaacagggctcccctgttttcccattccttcccccttttcccaaccccaaccgccgtatctggtggcggcaagacacacgggtctttccctctaaagcacaattgtgtgtgtgtcccaggtcctcctgcgtacggtgcgggagtgctcccacccaactgttgtaagcctgtccaacgcgtcgtcctggcaagactatgacgtcgcatgttccgctgcggatgccgaccgggtaaccggttccccagtgtgtgtagtgcgatcttccaggtcctcctggttggcgttgtccagaaactgcttcaggtaagtggggtgtgcccaatccctacaaaggttgattctttcaccaccttaggaatgctccggaggtaccccagcaacagctgggatctgaccggaggctaattgtctacgggtggtgtttcctttttcttttcacacaactctactgctgacaactcactgactatccacttgctctcttgtgcctttctgctctggttcaagttccttgattgtttttgactgcttttcactgcttttcttctcacaatccttgctcagttcaaagtc

SEQ ID NO: 676 - DNA, 635 bp, Kobuvirus sp.; identical to SEQ ID NO: 352

SEQ ID NO: 677 - DNA, 625 bp, Kobuvirus sp.
ccgggccaccgatacttcccttcactccttcgggactgttggggaggaacacaacagggctcccctgttttcccattccttcccccttttcccaaccccaaccgccgtatctggtggcggcaagacacacgggtctttccctctaaagcacaattgtgtgtgtgtcccaggtcctcctgcgtacggtgcgggagtgctcccacccaactgttgtaagcctgtccaacgcgtcgtcctggcaagactatgacgtcgcatgttccgctgcggatgccgaccgggtaaccggttccccagtgtgtgtagtgcgatcttccaggtcctcctggttggcgttgtccagaaactgcttcaggtaagtggggtgtgcccaatccctacaaaggttgattctttcaccaccttaggaatgctccggaggtaccccagcaacagctgggatctgaccggaggctaattgtctacgggtggtgtttcctttttcttttcacacaactctactgctgacaactcactgactatccacttgctctcttgtgcctttctgctctggttcaagttccttgattgtttttgactgcttttcactgcttttcttctcacaatccttgctcagttcaaagtc

SEQ ID NO: 678 - DNA, 675 bp, Unknown
  source: /note="Description of Unknown: Picornavirales sp. isolate RtMruf-PicoV sequence"
tttgctcagcgtaacttctccgggttacgtggagaccaaaaggctacggagactcgggctacggccctggagcacctaggtgctcctaaagacgttagaagttgtacaaactcgcccaatagggccccccaaccaggggggtagcgggcaagcacttctgtttccccggtatgatctcataggctgtacccacggctgaaagagagattatcgttacccgcctcactacttcgagaagcccagtaatggttcatgaagttgatctcgttgacccggtgtttcccccacaccagaaacctgtgatgggggtggtcatcccggtcatggcgacatgacggacctccccgcgccggcacagggcctcttcggaggacgagtgacatggattcaaccgtgaagagcctattgagctagtgttgattcctccgcccccgtgaatgcggctaatcccaactccggagcaggcgggcccaaaccagggtctggcctgtcgtaacgcgaaagtctggagcggaaccgactactttcgggaaggcgtgtttccttttgttccttttatcaagttttatggtgacaactcctggtagacgttttattgcgtttattgagagatttccaacaattgaacagactagaaccacttgttttatcaaaccctcacagaataagataaca

SEQ ID NO: 679 - DNA, 675 bp, Unknown
  source: /note="Description of Unknown: Apodemus agrarius picornavirus strain Longquan-Aa118 sequence"
ttactcagcgtaactactccgggttacgtgatgaagaagaggctacggagattctcgggctacggccctggagccactccggctcctaaagatttagaagtttgagcacacccgcccactagggccccccatccaggggggcaacgggcaagcacttctgtttccccggtatgatctgataggctgtaaccacggctgaaacagagattatcgttatccgcttcactacttcgagaagcctagtaatgatgggtgaaattgaatccgttgatccggtgtctcccccacaccagaaactcatgatgagggttgccatcccggctacggcgacgtagcgggcatccctgcgctggcatgaggcctcttaggaggacggatgatatggatcttgtcgtgaagagcctattgagctagtgtcgactcctccgcccccgtgaatgcggctaatcctaaccccggagcaggtgggtccaatccagggcctggcctgtcgtaatgcgtaagtctgggacggaaccgactactttcgggaaggcgtgtttccatttgttcattatttgtgtgtttatggtgacaactctgggtaaacgttctattgcgtttattgagagattcccaacaattgaacaaacgagaactacctgttttattaaatttacacagagaagaattaca

SEQ ID NO: 680 - DNA, 675 bp, Unknown
  source: /note="Description of Unknown: Niviventer confucianus picornavirus sequence"
ccctttcataaccccccccttttaacccaacccttcgtaaccgtacgcttcactcgcctttgggtatagcggcccaatgtgctgaagaaaaggatacgctataaggggccaacgggtggtggcccttaagaccacccaacctagaagcttgtacactcgggcaatagtgaggcccacatccagtgggtcaagcccaaagcattcttgttccccggtatgatctcataagctgtacccacggctgaaagagtgattatcgttatcccactcagtacttcggagagcctagtacaccacttggaaatggaagtctgtgatccggggttgaccctgaaccccagaaactcatgatgaggctaaccttcccgaacacggcgacgtgtggttagcctgcgctggcatgaggcctctttgtaggcagactgaaatggaagggtgacgaagagccgactgagctactgttttattcctccggccccctgaatgcggctaatcctaactcctggtccagtacttgtaacccaacaggtggctggtcgtaatgcgtaagccgggagcggaaccgactactttggggcgtccgtgtttctcaatattattcatttctagcttatggtgacaatttatgattgcagagattgtgctgtatttgtgtctgagagaagaagtaacaat

SEQ ID NO: 681 - DNA, 619 bp, Unknown
  source: /note="Description of Unknown: Bat picornavirus isolate BtRs-PicoV sequence"
tttcaaaaggccctgggcatacggcgttattcgtaacgtcgtatgtccagggcggtagcatcaggccaaggcctgatgctaccacgtgtggactaaaccacacactcttcttgtgacacgttgtgtcacctatccctttcttggtaacttagaagcttgtacacttacgcacgtaggtgccccacatccagtggggtttgtgcaaagcaatcttgttccccggtaaaccctgataggctgtaaccacggccgaaacaaggtttgtcgttacccgactcactactacacaaagcctagtaaagttcaatgaaagtgcgcagcgtgatccggtcaaaacccccttgaccagaaacacatgatgagggtcaccaacccccactggcgacagtgtggtgtccctgcgttggcatgtggcctcgtagaggcgttgcaatctggatttgctccgaagagccccgtgtgctagtgtttatacctccggccccttgaatgcggctaatcctaacccccgagcatgtacacacaagccagtgtgtagcatgtcgtaatgagcaatttggggatggaaccgactactttagggtgtccgtgtttctcattattctttgtttgatgtttt

SEQ ID NO: 682 - DNA, 593 bp, Unknown
  source: /note="Description of Unknown: Rhinolophus picornavirus strain Guizhou-Rr100 sequence"
ttttttttctcaggcggtagcatccagccaaggcctgatgctaccaacgtgtgactaaaccacactctctttttgtgatacattgtgtcacctatccctttcttggtaacttagaagcttgtacacccacgcacgtaggtaccccacatccagtggggtttgtgcaaagcattcttgttccccggtaaaccctgataggctgtaaccacggctgaaacaaggtttgtcgttacccgactcactactacgcaaagcctagtaaagttcaatgaaagtgcgcagcgtgatccggtcaaaacccccttgaccagaaacacatgatgagggtcaccaacccccactggcgacagtgtggtgtccctgcgttggcatgtggcctcatagaggcgttgcaatctggatttgctccgaagagccccgtgtgctagtgtttatacctccggccccttgaatgcggctaatcctaacccccgagcatgtacacacacgccagtgtgcagcatgtcgtaatgagcaatttggggatggaaccgactactttagggtgtccgtgtttctcattattctttgtttgatgttttatggtgacaaca

SEQ ID NO: 683 - DNA, 597 bp, Unknown
  source: /note="Description of Unknown: Rhinolophus picornavirus strain Henan-Rf265 sequence"
cggaacgttgtatgctcagggcgtaggcaccacccacgggtggtgcctacacgtgtggactaaaccacacactcttttcagcacttagtgctgctatctctttttgtaacttagaagtttgtacacaatgcgttagggccacacatccagtgtggtatcgcaaagcacttctgtttccccggtgctagtaggagggtggctgctccacggccacttgccgaacccatcgttacccgactcattacttcgcaaagcctagtaacccagttgaagcaagcccggcgtgttccggtcaggaaaaaccccccctggccagaaacatgtgatgagggtgggctatccccactggtgacagtgagccctccctgcgttggcacatggcccgatctgggcgtggttcttgtggatgctgccgaagagccccgtgagctagtgtttataccgccggcctcgtgaatgcggctaaccctaaccccggagcagaggctactgaagccacagtagtcgctgtcgtaacgagtaattctgggatgggaccgactactttcgagtgtccgtgtttcctttattcttttattgttgtttatggtgacaaac

SEQ ID NO: 684 - DNA, 636 bp, Enterovirus sp.
cccctaggatccactggatgtcagtacactggtatcgtggtacctttgtacgcctgttttatacccccttccccgcaactttagaagcatcaaaagcaccgctcaatagtcaccacacccccagtgtggtttcgagcaagcacttctgttttcccggttgcgtcccatatgctgtgcaaacggcaaaaagggacaatatcgttacccgcttgtatactacgggaaacctagtaccaccattgattgtgttgagagttgcgctcatcacctttccccggtgtagctcaggccgatgaggctcagaatcccccacaggtgactgtgtctgagcctgcgttggcggcctgccctcgccttatggcgtgggacgcttgatacatgacatggtgcgaagagtctactgtgctatgcaagagtcctccggcccctgaatgtggctaatcctaaccactgatcccacgcacgcaaaccagtgtgtagtgggtcgtaacgcgcaagtcggtggcggaaccaactactttgggtgaccgtgtttcctttattacttattgaatgtttatggtgacaattgtttgattcagttgttgccattctctacattcatttacccagcatcaaaccaattgaactgttaca

SEQ ID NO: 685 - DNA, 421 bp, Unknown
  source: /note="Description of Unknown: Human poliovirus 1 strain NIE1116623 sequence"
agtctggacatccctcaccggcgacggtggtccaggctgcgctggcggcctacctgtggtccaaagccacgggacgctacatgtgaacaaggtgtgaagagcctattgagctacaaaagagtcctccggcccctgaatgcggctaatcccaaccacggatcaagggtgcacaaaccagtgtacaccttgtcgtaacgcgcaagtctgtggcggaaccgactactttgggtgtccgtgtttcctttttaattttgatggctgcttatggtgacaatcatagattgttatcataaagctaattggattggccatccggtgagagtgaaatatattgtttacctccctgttgggtttactctaactaacttctccatttataaacttgtcatcacagttttaataattagaagtgcagtttaca

SEQ ID NO: 686 - DNA, 663 bp, Enterovirus sp.
tttaaaacagcctgggggttgttcccacccccagggcccactgggcgttagtactctggtatcgcggtaccttagtatgcctgttttatgtctcctttcccccgcaactttagaagtaatcaagttatggctcaacagtcgccacacccccagtgtggttccgagcaagcacttctgttccccggttgcgtcttatatgctgtgtgaacggcagaaagggacaatatcgttatccgctcaactactacgggaagcctagtaccaccatggattgacctgaaagttgcgttcagcgcacccccagcgcagctcaggccgatgaggctccgaataccccacgggcgaccgtgtcggagcctgcgttggcggcctgcccacgttgcaaaacgtgggacgctcatttcatgacatggtgcgaagagcctactgtgctagttgagagtcctccggcccctgaatgtggataatcctaaccactgaacctacgggcgcaaaccagcgtctggtaggccgtaacgcgcaagtcggtggcggaaccaactactttgggtgtccgtgtttccttttatctttttgaatgtttatggtgacaattgttgtgtacagttgttaccatagtttgcattcagaaataaacctaacactttccaattatttgttaca

SEQ ID NO: 687 - DNA, 675 bp, Unknown
  source: /note="Description of Unknown: Human poliovirus 2 strain NIE0811460 sequence"
ttgtgcgcctgttttatattccccccccgcaacttagaagcacgaaaccaagttcaatagaagggggtacaaaccagtaccaccacgaacaagcacttctgtttccccggtgacattgcatagactgctcacgcggttgaaagtgatcgatccgttacccgcttgtgtacttcgaaaagcctagtattgccttggaatcttcgacgcgttgcgctcagcacccgaccccggggtgtagcttaggctgatgagtctggacattcctcaccggtgacggtggtccaggctgcgttggcggcctacctatggctaatgccataggacgctagatgtgaacaaggtgtgaagagcctattgagctacataagagtcctccggcccctgaatgcggctaatcctaaccacggagcaggcggtcgcaaaccagtgactagcttgtcgtaacgcgcaagtctgtggcggaaccgactactttgggtgtccgtgtttcctgttatttttattatggctgcttatggtgacaatcagagattgttatcataaagcgaattggattggccatccggtgagtgttgtgtcaggtatacaactgtttgttggaaccactgtgttagtttaacctctctttcaaccaattagtcaaaaacaatacgaagatagaacaacaatactaca

SEQ ID NO: 688 - DNA, 512 bp, Unknown; identical to SEQ ID NO: 491
  source: /note="Description of Unknown: Bovine picornavirus sequence"

SEQ ID NO: 689 - DNA, 675 bp, Unknown
  source: /note="Description of Unknown: Human poliovirus 1 strain EQG1419328 sequence"
acccttgtacgcctgttttatactcccctccccgtaacttagaagaaacaaaataagttcaataggagggggtacaaaccagtaccaccacgaacaagcacttctgtctccccggtgacattgcatagactgtccccacggttgaaagcaattgatccgttacccgctcttgtacttcgagaagcctagtaccatcttggaatcatcgatgcgttgcgctccacactcagtcccagagtgtagcttaggctgatgagtctggacattcctcaccggcgacggtggtccaggctgcgttggcggcctacctgtggcccaaagccacaggacgctagatgtgaacaaggtgtgaagagcctattgagctataagagagtcctccggcccctgaatgcggctaatcccaaccacggatcaagggtgcacgaaccagtgtataccttgtcgtaacgcgcaagtccgtggcggaaccgactactttgggtgaccgtgtttccttttattatttcaatggctgcttatggtgacaatcattgattgttatcataaagcgaattggactggccatccggtgaaagtgaaacatattgtttgcctcctcgttgggtctacttcaaccaatctttacttacaatcttaccactacagttttgctggttagaagtgtgtttcacg

SEQ ID NO: 690 - DNA, 675 bp, Unknown
  source: /note="Description of Unknown: Human poliovirus 2 isolate IS_061 sequence"
ttgtgcgcctgttttatactcccctcccgcaacttagaagcacgaaaccaagttcaatagaagggggtacaaaccagtaccactacgaacaagcacttctgtttccccggtgacattgcatagactgctcacgcggttgaaagtgatcgatccgttacccgcttgtgtacttcgaaaagcctagtatcgccttggaatcttcgacgcgttgcgctcagcacccgaccccggggtgtagcttaggccgatgagtctggacattcctcaccggtgacggtggtccaggctgcgttggcggcctacctatggctaacgccataggacgttagatgtgaacaaggtgtgaagagcctattgagctacataagagtcctccggcccctgaatgcggctaatcctaaccacggagcaggcggtcgcgaaccagtgactggcttgtcgtaacgcgcaagtctgtggcggaaccgactactttgggtgtccgtgtttcctgttatttttatcatggctgcttatggtgacaatcagagattgttatcataaagcgaattggattggccatccggtgagtgttgtgtcaggtatacaactgtttgttggaaccactgtgttagctttgcttctcatttaaccaattaatcaaaaacaatacgaggataaaacaacaatactaca

SEQ ID NO: 691 - DNA, 675 bp, Unknown
  source: /note="Description of Unknown: Coxsackievirus B5 sequence"
cctttgtgcgcctgttttatgcccccttcccccaattgaaacttagaagttacacacaccgatcaacagcgggcgtggcataccagccgcgtcttgatcaagcactcctgtttccccggaccgagtatcaatagactgctcacgcggttgaaggagaaaacgttcgttacccggctaactacttcgagaaacctagtagcatcatgaaagttgcgaagcgtttcgctcagcacatccccagtgtagatcaggtcgatgagtcaccgcattccccacgggcgaccgtggcggtggctgcgttggcggcctgcctacggggcaacccgtaggacgcttcaatacagacatggtgcgaagagtcgattgagctagttagtagtcctccggcccctgaatccggctaatcctaactgcggagcacataccctcaacccagggggcattgtgtcgtaacgggtaactctgcagcggaaccgactactttgggtgtccgtgtttccttttattcttataatggctgcttatggtgacaattgaaagattgttaccatatagctattggattggccatccggtgtctaacagagctattatatacctctttgttggatttgtaccacttgatctaaaggaagtcaagacactacaattcatcatacaattgaacacagcaaa

SEQ ID NO: 692 - DNA, 675 bp, Unknown
  source: /note="Description of Unknown: Coxsackievirus A10 sequence"
tttgtgcgcctgttttacaacccttccccaacttgtaacgtagaagtaatacacactactgatcaatagcaggcatggcgcgccagtcatgtctcgatcaagcacttctgttcccccggactgagtatcaatagactgctcacgcggttgaaggagaaaacgttcgttacccggctaactacttcgagaaacctagtagcaccatagaagctgcagagtgtttcgctcagcacttcccccgtgtagatcaggctgatgagtcactgcaatccccacgggtgaccgtggcagtggctgcgttggcggcctgcctatggggcaacccataggacgctctaatgtggacatggtgcgaagagtctattgagctagttagtagtcctccggcccctgaatgcggctaatcctaactgcggagcacatgccttcaacccagaaggtagtgtgtcgtaacgggcaactctgcagcggaaccgactactttgggtgtccgtgtttctttttattcctatattggctgcttatggtgacaatcacggaattgttgccatatagctattggattggccatccggtgtctaatagagctattgtgtacctatttgttggatttactccgctatcacataaatctctgaacactttgtgctttatattgaacttaaacacccgaaa

SEQ ID NO: 693 - skipped

SEQ ID NO: 694 - DNA, 30 bp, Artificial Sequence
  source: /note="Description of Artificial Sequence: Synthetic oligonucleotide"
tataattctaccctattgaggcattgacta

SEQ ID NO: 695 - protein, 493 aa, Artificial Sequence; identical to SEQ ID NO: 320
  source: /note="Description of Artificial Sequence: Synthetic polypeptide"

SEQ ID NO: 696 - protein, 207 aa, Artificial Sequence
  source: /note="Description of Artificial Sequence: Synthetic polypeptide"
KNQVEQSPQSLIILEGKNCTLQCNYTVSPFSNLRWYKQDTGRGPVSLTIMTFSENTKSNGRYTATLDADTKQSSLHITASQLSDSASYICVVNHSGGSYIPTFGRGTSLIVHPYIQKPDPAVYQLRDSKSSDKSVCLFTDFDSQTNVSQSKDSDVYITDKTVLDMRSMDFKSNSAVAWSNKSDFACANAFNNSIIPEDTFFPSPESS

SEQ ID NO: 697 - protein, 246 aa, Artificial Sequence
  source: /note="Description of Artificial Sequence: Synthetic polypeptide"
DVKVTQSSRYLVKRTGEKVFLECVQDMDHENMFWYRQDPGLGLRLIYFSYDVKMKEKGDIPEGYSVSREKKERFSLILESASTNQTSMYLCASSFLMTSGDPYEQYFGPGTRLTVTEDLKNVFPPEVAVFEPSEAEISHTQKATLVCLATGFYPDHVELSWWVNGKEVHSGVSTDPQPLKEQPALNDSRYCLSSRLRVSATFWQNPRNHFRCQVQFYGLSENDEWTQDRAKPVTQIVSAEAWGRAD

SEQ ID NO: 698 - protein, 115 aa, Artificial Sequence
  source: /note="Description of Artificial Sequence: Synthetic polypeptide"
MQEVTQIPAALSVPEGENLVLNCSFTDSAIYNLQWFRQDPGKGLTSLLLIQSSQREQTSGRLNASLDKSSGRSTLYIAASQPGDSATYLCAVRPTSGGSYIPTFGRGTSLIVHPY

SEQ ID NO: 699 - protein, 112 aa, Artificial Sequence
  source: /note="Description of Artificial Sequence: Synthetic polypeptide"
MGVTQTPKFQVLKTGQSMTLQCAQDMNHEYMSWYRQDPGMGLRLIHYSVGAGITDQGEVPNGYNVSRSTTEDFPLRLLSAAPSQTSVYFCASSYVGNTGELFFGEGSRLTVL

SEQ ID NO: 700 - protein, 166 aa, Artificial Sequence
  source: /note="Description of Artificial Sequence: Synthetic polypeptide"
APPRLICDSRVLERYLLEAKEAENITTGCAEHCSLNENITVPDTKVNFYAWKRMEVGQQAVEVWQGLALLSEAVLRGQALLVNSSQPWEPLQLHVDKAVSGLRSLTTLLRALGAQKEAISPPDAASAAPLRTITADTFRKLFRVYSNFLRGKLKLYTGEACRTGDR

SEQ ID NO: 701 - protein, 452 aa, Artificial Sequence
  source: /note="Description of Artificial Sequence: Synthetic polypeptide"
MSTAVLENPGLGRKLSDFGQETSYIEDNCNQNGAISLIFSLKEEVGALAKVLRLFEENDVNLTHIESRPSRLKKDEYEFFTHLDKRSLPALTNIIKILRHDIGATVHELSRDKKKDTVPWFPRTIQELDRFANQILSYGAELDADHPGFKDPVYRARRKQFADIAYNYRHGQPIPRVEYMEEEKKTWGTVFKTLKSLYKTHACYEYNHIFPLLEKYCGFHEDNIPQLEDVSQFLQTCTGFRLRPVAGLLSSRDFLGGLAFRVFHCTQYIRHGSKPMYTPEPDICHELLGHVPLFSDRSFAQFSQEIGLASLGAPDEYIEKLATIYWFTVEFGLCKQGDSIKAYGAGLLSSFGELQYCLSEKPKLLPLELEKTAIQNYTVTEFQPLYYVAESFNDAKEKVRNFAATIPRPFSVRYDPYTQRIEVLDNTQQLKILADSINSEIGILCSALQKIK

SEQ ID NO: 702 - protein, 1462 aa, Artificial Sequence
  source: /note="Description of Artificial Sequence: Synthetic polypeptide"
LSVKAQTAHIVLEDGTKMKGYSFGHPSSVAGEVVFNTGLGGYPEAITDPAYKGQILTMANPIIGNGGAPDTTALDELGLSKYLESNGIKVSGLLVLDYSKDYNHWLATKSLGQWLQEEKVPAIYGVDTRMLTKIIRDKGTMLGKIEFEGQPVDFVDPNKQNLIAEVSTKDVKVYGKGNPTKVVAVDCGIKNNVIRLLVKRGAEVHLVPWNHDFTKMEYDGILIAGGPGNPALAEPLIQNVRKILESDRKEPLFGISTGNLITGLAAGAKTYKMSMANRGQNQPVLNITNKQAFITAQNHGYALDNTLPAGWKPLFVNVNDQTNEGIMHESKPFFAVQFHPEVTPGPIDTEYLFDSFFSLIKKGKATTITSVLPKPALVASRVEVSKVLILGSGGLSIGQAGEFDYSGSQAVKAMKEENVKTVLMNPNIASVQTNEVGLKQADTVYFLPITPQFVTEVIKAEQPDGLILGMGGQTALNCGVELFKRGVLKEYGVKVLGTSVESIMATEDRQLFSDKLNEINEKIAPSFAVESIEDALKAADTIGYPVMIRSAYALGGLGSGICPNRETLMDLSTKAFAMTNQILVEKSVTGWKEIEYEVVRDADDNCVTVCNMENVDAMGVHTGDSVVVAPAQTLSNAEFQMLRRTSINVVRHLGIVGECNIQFALHPTSMEYCIIEVNARLSRSSALASKATGYPLAFIAAKIALGIPLPEIKNVVSGKTSACFEPSLDYMVTKIPRWDLDRFHGTSSRIGSSMKSVGEVMAIGRTFEESFQKALRMCHPSIEGFTPRLPMNKEWPSNLDLRKELSEPSSTRIYAIAKAIDDNMSLDEIEKLTYIDKWFLYKMRDILNMEKTLKGLNSESMTEETLKRAKEIGFSDKQISKCLGLTEAQTRELRLKKNIHPWVKQIDTLAAEYPSVTNYLYVTYNGQEHDVNFDDHGMMVLGCGPYHIGSSVEFDWCAVSSIRTLRQLGKKTVVVNCNPETVSTDFDECDKLYFEELSLERILDIYHQEACGGCIISVGGQIPNNLAVPLYKNGVKIMGTSPLQIDRAEDRSIFSAVLDELKVAQAPWKAVNTLNEALEFAKSVDYPCLLRPSYVLSGSAMNVVFSEDEMKKFLEEATRVSQEHPVVLTKFVEGAREVEMDAVGKDGRVISHAISEHVEDAGVHSGDATLMLPTQTISQGAIEKVKDATRKIAKAFAISGPFNVQFLVKGNDVLVIECNLRASRSFPFVSKTLGVDFIDVATKVMIGENVDEKHLPTLDHPIIPADYVAIKAPMFSWPRLRDADPILRCEMASTGEVACFGEGIHTAFLKAMLSTGFKIPQKGILIGIQQSFRPRFLGVAEQLHNEGFKLFATEATSDWLNANNVPATPVAWPSQEGQNPSLSSIRKLIRDGSIDLVINLPNNNTKFVHDNYVIRRTAVDSGIPLLTNFQVTKLFAEAVQKSRKVDSKSLFHYRQYSAGKAA

SEQ ID NO: 703 - protein, 1053 aa, Artificial Sequence
  source: /note="Description of Artificial Sequence: Synthetic polypeptide"
MKRNYILGLDIGITSVGYGIIDYETRDVIDAGVRLFKEANVENNEGRRSKRGARRLKRRRRHRIQRVKKLLFDYNLLTDHSELSGINPYEARVKGLSQKLSEEEFSAALLHLAKRRGVHNVNEVEEDTGNELSTKEQISRNSKALEEKYVAELQLERLKKDGEVRGSINRFKTSDYVKEAKQLLKVQKAYHQLDQSFIDTYIDLLETRRTYYEGPGEGSPFGWKDIKEWYEMLMGHCTYFPEELRSVKYAYNADLYNALNDLNNLVITRDENEKLEYYEKFQIIENVFKQKKKPTLKQIAKEILVNEEDIKGYRVTSTGKPEFTNLKVYHDIKDITARKEIIENAELLDQIAKILTIYQSSEDIQEELTNLNSELTQEEIEQISNLKGYTGTHNLSLKAINLILDELWHTNDNQIAIFNRLKLVPKKVDLSQQKEIPTTLVDDFILSPVVKRSFIQSIKVINAIIKKYGLPNDIIIELAREKNSKDAQKMINEMQKRNRQTNERIEEIIRTTGKENAKYLIEKIKLHDMQEGKCLYSLEAIPLEDLLNNPFNYEVDHIIPRSVSFDNSFNNKVLVKQEENSKKGNRTPFQYLSSSDSKISYETFKKHILNLAKGKGRISKTKKEYLLEERDINRFSVQKDFINRNLVDTRYATRGLMNLLRSYFRVNNLDVKVKSINGGFTSFLRRKWKFKKERNKGYKHHAEDALIIANADFIFKEWKKLDKAKKVMENQMFEEKQAESMPEIETEQEYKEIFITPHQIKHIKDFKDYKYSHRVDKKPNRELINDTLYSTRKDDKGNTLIVNNLNGLYDKDNDKLKKLINKSPEKLLMYHHDPQTYQKLKLIMEQYGDEKNPLYKYYEETGNYLTKYSKKDNGPVIKKIKYYGNKLNAHLDITDDYPNSRNKVVKLSLKPYRFDVYLDNGVYKFVTVKNLDVIKKENYYEVNSKCYEEAKKLKKISNQAEFIASFYNNDLIKINGELYRVIGVNNDLLNRIEVNMIDITYREYLENMNDKRPPRIIKTIASKTQSIKKYSTDILGNLYEVKSKKHPQIIKKG

SEQ ID NO: 704 - protein, 1353 aa, Artificial Sequence
  source: /note="Description of Artificial Sequence: Synthetic polypeptide"
AAGGILHLELLVAVGPDVFQAHQEDTERYVLTNLNIGAELLRDPSLGAQFRVHLVKMVILTEPEGAPNITANLTSSLLSVCGWSQTINPEDDTDPGHADLVLYITRFDLELPDGNRQVRGVTQLGGACSPTWSCLITEDTGFDLGVTIAHEIGHSFGLEHDGAPGSGCGPSGHVMASDGAAPRAGLAWSPCSRRQLLSLLSAGRARCVWDPPRPQPGSAGHPPDAQPGLYYSANEQCRVAFGPKAVACTFAREHLDMCQALSCHTDPLDQSSCSRLLVPLLDGTECGVEKWCSKGRCRSLVELTPIAAVHGRWSSWGPRSPCSRSCGGGVVTRRRQCNNPRPAFGGRACVGADLQAEMCNTQACEKTQLEFMSQQCARTDGQPLRSSPGGASFYHWGAAVPHSQGDALCRHMCRAIGESFIMKRGDSFLDGTRCMPSGPREDGTLSLCVSGSCRTFGCDGRMDSQQVWDRCQVCGGDNSTCSPRKGSFTAGRAREYVTFLTVTPNLTSVYIANHRPLFTHLAVRIGGRYVVAGKMSISPNTTYPSLLEDGRVEYRVALTEDRLPRLEEIRIWGPLQEDADIQVYRRYGEEYGNLTRPDITFTYFQPKPRQAWVWAAVRGPCSVSCGAGLRWVNYSCLDQARKELVETVQCQGSQQPPAWPEACVLEPCPPYWAVGDFGPCSASCGGGLRERPVRCVEAQGSLLKTLPPARCRAGAQQPAVALETCNPQPCPARWEVSEPSSCTSAGGAGLALENETCVPGADGLEAPVTEGPGSVDEKLPAPEPCVGMSCPPGWGHLDATSAGEKAPSPWGSIRTGAQAAHVWTPAAGSCSVSCGRGLMELRFLCMDSALRVPVQEELCGLASKPGSRREVCQAVPCPARWQYKLAACSVSCGRGVVRRILYCARAHGEDDGEEILLDTQCQGLPRPEPQEACSLEPCPPRWKVMSLGPCSASCGLGTARRSVACVQLDQGQDVEVDEAACAALVRPEASVPCLIADCTYRWHVGTWMECSVSCGDGIQRRRDTCLGPQAQAPVPADFCQHLPKPVTVRGCWAGPCVGQGTPSLVPHEEAAAPGRTTATPAGASLEWSQARGLLFSPAPQPRRLLPGPQENSVQSSACGRQHLEPTGTIDMRGPGQADCAVAIGRPLGEVVTLRVLESSLNCSAGDMLLLWGRLTWRKMCRKLLDMTFSSKTNTLVVRQRCGRPGGGVLLRYGSQLAPETFYRECDMQLFGPWGEIVSPSLSPATSNAGGCRLFINVAPHARIAIHALATNMGAGTEGANASYILIRDTHSLRTTAFHGQQVLYWESESSQAEMEFSEGFLKAQASLRGQYWTLQSWVPEMQDPQSWKGKEGT

SEQ ID NO: 705 - protein, 431 aa, Artificial Sequence; identical to SEQ ID NO: 343
  source: /note="Description of Artificial Sequence: Synthetic polypeptide"

SEQ ID NO: 706 - protein, 160 aa, Artificial Sequence; identical to SEQ ID NO: 337
  source: /note="Description of Artificial Sequence: Synthetic polypeptide"

SEQ ID NO: 707 - protein, 133 aa, Artificial Sequence [sequence omitted]

SEQ ID NO: 708-717 - skipped (10 entries)

SEQ ID NO: 718 - protein, 96 aa, Unknown
  source: /note="Description of Unknown: CCL1 sequence"
MQIITTALVCLLLAGMWPEDVDSKSMQVPFSRCCFSFAEQEIPLRAILCYRNTSSICSNEGLIFKLKRGKEACALDTVGWVQRHRKMLRHCPSKRK

SEQ ID NO: 719 - protein, 50 aa, Unknown
  source: /note="Description of Unknown: CCL2 sequence"
MKVSAALLCLLLIAATFIPQGLAQPDAINAPVTCCYNFTNRKISVQRLAS

SEQ ID NO: 720 - protein, 92 aa, Unknown
  source: /note="Description of Unknown: CCL3 sequence"
MQVSTAALAVLLCTMALCNQFSASLAADTPTACCFSYTSRQIPQNFIADYFETSSQCSKPGVIFLTKRSRQVCADPSEEWVQKYVSDLELSA

SEQ ID NO: 721 - protein, 92 aa, Unknown
  source: /note="Description of Unknown: CCL4 sequence"
MKLCVTVLSLLMLVAAFCSPALSAPMGSDPPTACCFSYTARKLPRNFVVDYYETSSLCSQPAVVFQTKRSKQVCADPSESWVQEYVYDLELN

SEQ ID NO: 722 - protein, 91 aa, Unknown
  source: /note="Description of Unknown: CCL5 sequence"
MKVSAAALAVILIATALCAPASASPYSSDTTPCCFAYIARPLPRAHIKEYFYTSGKCSNPAVVFVTRKNRQVCANPEKKWVREYINSLEMS

SEQ ID NO: 723 - protein, 116 aa, Unknown
  source: /note="Description of Unknown: CCL6 sequence"
MRNSKTAISFFILVAVLGSQAGLIQEMEKEDRRYNPPIIHQGFQDTSSDCCFSYATQIPCKRFIYYFPTSGGCIKPGIIFISRRGTQVCADPSDRRVQRCLSTLKQGPRSGNKVIA

SEQ ID NO: 724 - protein, 99 aa, Unknown
  source: /note="Description of Unknown: CCL7 sequence"
MKASAALLCLLLTAAAFSPQGLAQPVGINTSTTCCYRFINKKIPKQRLESYRRTTSSHCPREAVIFKTKLDKEICADPTQKWVQDFMKHLDKKTQTPKL

SEQ ID NO: 725 - protein, 99 aa, Unknown
  source: /note="Description of Unknown: CCL8 sequence"
MKVSAALLCLLLMAATFSPQGLAQPDSVSIPITCCFNVINRKIPIQRLESYTRITNIQCPKEAVIFKTKRGKEVCADPKERWVRDSMKHLDQIFQNLKP

SEQ ID NO: 726 - protein, 122 aa, Unknown
  source: /note="Description of Unknown: CCL9/CCL10 sequence"
MKPFHTALSFLILTTALGIWAQITHATETKEVQSSLKAQQGLEIEMFHMGFQDSSDCCLSYNSRIQCSRFIGYFPTSGGCTRPGIIFISKRGFQVCANPSDRRVQRCIERLEQNSQPRTYKQ

SEQ ID NO: 727 - protein, 97 aa, Unknown
  source: /note="Description of Unknown: CCL11 sequence"
MKVSAALLWLLLIAAAFSPQGLAGPASVPTTCCFNLANRKIPLQRLESYRRITSGKCPQKAVIFKTKLAKDICADPKKKWVQDSMKYLDQKSPTPKP

SEQ ID NO: 728 - protein, 104 aa, Unknown
  source: /note="Description of Unknown: CCL12 sequence"
MKISTLLCLLLIATTISPQVLAGPDAVSTPVTCCYNVVKQKIHVRKLKSYRRITSSQCPREAVIFRTILDKEICADPKEKWVKNSINHLDKTSQTFILEPSCLG

SEQ ID NO: 729 - protein, 98 aa, Unknown
  source: /note="Description of Unknown: CCL13 sequence"
MKVSAVLLCLLLMTAAFNPQGLAQPDALNVPSTCCFTFSSKKISLQRLKSYVITTSRCPQKAVIFRTKLGKEICADPKEKWVQNYMKHLGRKAHTLKT

SEQ ID NO: 730 - protein, 93 aa, Unknown
  source: /note="Description of Unknown: CCL14 sequence"
MKISVAAIPFFLLITIALGTKTESSSRGPYHPSECCFTYTTYKIPRQRIMDYYETNSQCSKPGIVFITKRGHSVCTNPSDKWVQDYIKDMKEN

SEQ ID NO: 731 - protein, 113 aa, Unknown
  source: /note="Description of Unknown: CCL15 sequence"
MKVSVAALSCLMLVAVLGSQAQFINDAETELMMSKLPLENPVVLNSFHFAADCCTSYISQSIPCSLMKSYFETSSECSKPGVIFLTKKGRQVCAKPSGPGVQDCMKKLKPYSI

SEQ ID NO: 732 - protein, 120 aa, Unknown
  source: /note="Description of Unknown: CCL16 sequence"
MKVSEAALSLLVLILIITSASRSQPKVPEWVNTPSTCCLKYYEKVLPRRLVVGYRKALNCHLPAIIFVTKRNREVCTNPNDDWVQEYIKDPNLPLLPTRNLSTVKIITAKNGQPQLLNSQ

SEQ ID NO: 733 - protein, 94 aa, Unknown
  source: /note="Description of Unknown: CCL17 sequence"
MAPLKMLALVTLLLGASLQHIHAARGTNVGRECCLEYFKGAIPLRKLKTWYQTSEDCSRDAIVFVTVQGRAICSDPNNKRVKNAVKYLQSLERS

SEQ ID NO: 734 - protein, 89 aa, Unknown
  source: /note="Description of Unknown: CCL18 sequence"
MKGLAAALLVLVCTMALCSCAQVGTNKELCCLVYTSWQIPQKFIVDYSETSPQCPKPGVILLTKRGRQICADPNKKWVQKYISDLKLNA

SEQ ID NO: 735 - protein, 98 aa, Unknown
  source: /note="Description of Unknown: CCL19 sequence"
MALLLALSLLVLWTSPAPTLSGTNDAEDCCLSVTQKPIPGYIVRNFHYLLIKDGCRVPAVVFTTLRGRQLCAPPDQPWVERIIQRLQRTSAKMKRRSS

SEQ ID NO: 736 - protein, 96 aa, Unknown
  source: /note="Description of Unknown: CCL20 sequence"
MCCTKSLLLAALMSVLLLHLCGESEAASNFDCCLGYTDRILHPKFIVGFTRQLANEGCDINAIIFHTKKKLSVCANPKQTWVKYIVRLLSKKVKNM

SEQ ID NO: 737 - protein, 134 aa, Unknown
  source: /note="Description of Unknown: CCL21 sequence"
MAQSLALSLLILVLAFGIPRTQGSDGGAQDCCLKYSQRKIPAKVVRSYRKQEPSLGCSIPAILFLPRKRSQAELCADPKELWVQQLMQHLDKTPSPQKPAQGCRKDRGASKTGKKGKGSKGCKRTERSQTPKGP

SEQ ID NO: 738 - protein, 93 aa, Unknown
  source: /note="Description of Unknown: CCL22 sequence"
MDRLQTALLVVLVLLAVALQATEAGPYGANMEDSVCCRDYVRYRLPLRVVKHFYWTSDSCPRPGVVLLTFRDKEICADPRVPWVKMILNKLSQ

SEQ ID NO: 739 - protein, 120 aa, Unknown
  source: /note="Description of Unknown: CCL23 sequence"
MKVSVAALSCLMLVTALGSQARVTKDAETEFMMSKLPLENPVLLDRFHATSADCCISYTPRSIPCSLLESYFETNSECSKPGVIFLTKKGRRFCANPSDKQVQVCVRMLKLDTRIKTRKN

SEQ ID NO: 740 - protein, 119 aa, Unknown
  source: /note="Description of Unknown: CCL24 sequence"
MAGLMTIVTSLLFLGVCAHHIIPTGSVVIPSPCCMFFVSKRIPENRVVSYQLSSRSTCLKAGVIFTTKKGQQFCGDPKQEWVQRYMKNLDAKQKKASPRARAVAVKGPVQRYPGNQTTC

SEQ ID NO: 741 - protein, 150 aa, Unknown
  source: /note="Description of Unknown: CCL25 sequence"
MNLWLLACLVAGFLGAWAPAVHTQGVFEDCCLAYHYPIGWAVLRRAWTYRIQEVSGSCNLPAAIFYLPKRHRKVCGNPKSREVQRAMKLLDARNKVFAKLHHNTQTFQAGPHAVKKLSSGNSKLSSSKFSNPISSSKRNVSLLISANSGL

SEQ ID NO: 742 - protein, 94 aa, Unknown
  source: /note="Description of Unknown: CCL26 sequence"
MMGLSLASAVLLASLLSLHLGTATRGSDISKTCCFQYSHKPLPWTWVRSYEFTSNSCSQRAVIFTTKRGKKVCTHPRKKWVQKYISLLKTPKQL

SEQ ID NO: 743 - protein, 112 aa, Unknown
  source: /note="Description of Unknown: CCL27 sequence"
MKGPPTFCSLLLLSLLLSPDPTAAFLLPPSTACCTQLYRKPLSDKLLRKVIQVELQEADGDCHLQAFVLHLAQRSICIHPQNPSLSQWFEHQERKLHGTLPKLNFGMLRKMG

SEQ ID NO: 744 - protein, 127 aa, Unknown
  source: /note="Description of Unknown: CCL28 sequence"
MQQRGLAIVALAVCAALHASEAILPIASSCCTEVSHHISRRLLERVNMCRIQRADGDCDLAAVILHVKRRRICVSPHNHTVKQWMKVQAAKKNGKGNVCHRKKHHGKRNSNRAHQGKHETYGHKTPY

SEQ ID NO: 745 - protein, 107 aa, Unknown
  source: /note="Description of Unknown: CXCL1 sequence"
MARAALSAAPSNPRLLRVALLLLLLVAAGRRAAGASVATELRCQCLQTLQGIHPKNIQSVNVKSPGPHCAQTEVIATLKNGRKACLNPASPIVKKIIEKMLNSDKSN

SEQ ID NO: 746 - protein, 107 aa, Unknown
  source: /note="Description of Unknown: CXCL2 sequence"
MARATLSAAPSNPRLLRVALLLLLLVAASRRAAGAPLATELRCQCLQTLQGIHLKNIQSVKVKSPGPHCAQTEVIATLKNGQKACLNPASPMVKKIIEKMLKNGKSN

SEQ ID NO: 747 - protein, 107 aa, Unknown
  source: /note="Description of Unknown: CXCL3 sequence"
MAHATLSAAPSNPRLLRVALLLLLLVAASRRAAGASVVTELRCQCLQTLQGIHLKNIQSVNVRSPGPHCAQTEVIATLKNGKKACLNPASPMVQKIIEKILNKGSTN

SEQ ID NO: 748 - protein, 365 aa, Unknown
  source: /note="Description of Unknown: CXCL4 sequence"
MAYYEESIIFDTDNSSEESGDFDVDFQGPCERAPNYDFHKIFLPTVFGIIFILGIFGNGLVVIVMGFQNKCKTSMTDKYRLHLSVADLMFVLTLPFWAVDAASSWYFGGFLCKAVHMIYTVNLYSSVLILAFISLDRYLAVVRATATSSQATRKLLAGKVIYVCVWLPAAILTVPDLVFASSFEVELDMGGSRMICQRIYPLESNHIWVAAFRFQHILVGFVLPGLVILTCYCIIISKLSQGSKGQALKRKALKTTVILILCFFCCWLPYCAGIFVDTLMNLEVIPHSCALEQGVMKWISITEVLAYFHCCLNPILYAFLGVKFKKSARNALTFSSRSSHKMLTKKRGAISSASTESESSSVLYS

SEQ ID NO: 749 - protein, 114 aa, Unknown
  source: /note="Description of Unknown: CXCL5 sequence"
MSLLSSRAARVPGPSSSLCALLVLLLLLTQPGPIASAGPAAAVLRELRCVCLQTTQGVHPKMISNLQVFAIGPQCSKVEVVASLKNGKEICLDPEAPFLKKVIQKILDGGNKEN

SEQ ID NO: 750 - protein, 114 aa, Unknown
  source: /note="Description of Unknown: CXCL6 sequence"
MSLPSSRAARVPGPSGSLCALLALLLLLTPPGPLASAGPVSAVLTELRCTCLRVTLRVNPKTIGKLQVFPAGPQCSKVEVVASLKNGKQVCLDPEAPFLKKVIQKILDSGNKKN

SEQ ID NO: 751 - protein, 128 aa, Unknown
  source: /note="Description of Unknown: CXCL7 sequence"
MSLRLDTTPSCNSARPLHALQVLLLLSLLLTALASSTKGQTKRNLAKGKEESLDSDLYAELRCMCIKTTSGIHPKNIQSLEVIGKGTHCNQVEVIATLKDGRKICLDPDAPRIKKIVQKKLAGDESAD

SEQ ID NO: 752 - protein, 99 aa, Unknown
  source: /note="Description of Unknown: CXCL8 sequence"
MTSKLAVALLAAFLISAALCEGAVLPRSAKELRCQCIKTYSKPFHPKFIKELRVIESGPHCANTEIIVKLSDGRELCLDPKENWVQRVVEKFLKRAENS

SEQ ID NO: 753 - protein, 125 aa, Unknown
  source: /note="Description of Unknown: CXCL9 sequence"
MKKSGVLFLLGIILLVLIGVQGTPVVRKGRCSCISTNQGTIHLQSLKDLKQFAPSPSCEKIEIIATLKNGVQTCLNPDSADVKELIKKWEKQVSQKKKQKNGKKHQKKKVLKVRKSQRSRQKKTT

SEQ ID NO: 754 - protein, 98 aa, Unknown
  source: /note="Description of Unknown: CXCL10 sequence"
MNQTAILICCLIFLTLSGIQGVPLSRTVRCTCISISNQPVNPRSLEKLEIIPASQFCPRVEIIATMKKKGEKRCLNPESKAIKNLLKAVSKERSKRSP

SEQ ID NO: 755 - protein, 94 aa, Unknown
  source: /note="Description of Unknown: CXCL11 sequence"
MSVKGMAIALAVILCATVVQGFPMFKRGRCLCIGPGVKAVKVADIEKASIMYPSNNCDKIEVIITLKENKGQRCLNPKSKQARLIIKKVERKNF

SEQ ID NO: 756 - protein, 93 aa, Unknown
  source: /note="Description of Unknown: CXCL12 sequence"
MNAKVVVVLVLVLTALCLSDGKPVSLSYRCPCRFFESHVARANVKHLKILNTPNCALQIVARLKNNNRQVCIDPKLKWIQEYLEKALNKRFKM

SEQ ID NO: 757 - protein, 109 aa, Unknown
  source: /note="Description of Unknown: CXCL13 sequence"
MKFISTSLLLMLLVSSLSPVQGVLEVYYTSLRCRCVQESSVFIPRRFIDRIQILPRGNGCPRKEIIVWKKNKSIVCVDPQAEWIQRMMEVLRKRSSSTLPVPVFKRKIP

SEQ ID NO: 758 - protein, 111 aa, Unknown
  source: /note="Description of Unknown: CXCL14 sequence"
MSLLPRRAPPVSMRLLAAALLLLLLALYTARVDGSKCKCSRKGPKIRYSDVKKLEMKPKYPHCEEKMVIITTKSVSRYRGQEHCLHPKLQSTKRFIKWYNAWNEKRRVYEE

SEQ ID NO: 759 - protein, 167 aa, Unknown
  source: /note="Description of Unknown: CXCL15 sequence"
MAAQGWSMLLLAVLNLGIFVRPCDTQELRCLCIQEHSEFIPLKLIKNIMVIFETIYCNRKEVIAVPKNGSMICLDPDAPWVKATVGPITNRFLPEDLKQKEFPPAMKLLYSVEHEKPLYLSFGRPENKRIFPFPIRETSRHFADLAHNSDRNFLRDSSEVSLTGSDA

SEQ ID NO: 760 - protein, 250 aa, Unknown
  source: /note="Description of Unknown: CXCL16 sequence"
MGRDLRPGSRVLLLLLLLLLVYLTQPGNGNEGSVTGSCYCGKRISSDSPPSVQFMNRLRKHLRAYHRCLYYTRFQLLSWSVCGGNKDPWVQELMSCLDLKECGHAYSGIVAHQKHLLPTSPPISQASEGASSDIHTPAQMLLSTLQSTQRPTLPVGSLSSDKELTRPNETTIHTAGHSLAAGPEAGENQKQPEKNAGPTARTSATVPVLCLLAIIFILTAALSYVLCKRRRGQSPQSSPDLPVHYIPVAP

SEQ ID NO: 761 - protein, 119 aa, Unknown
  source: /note="Description of Unknown: CXCL17 sequence"
MKVLISSLLLLLPLMLMSMVSSSLNPGVARGHRDRGQASRRWLQEGGQECECKDWFLRAPRRKFMTVSGLPKKQCPCDHFKGNVKKTRHQRHHRKPNKHSRACQQFLKQCQLRSFALPL

SEQ ID NO: 762 - protein, 114 aa, Unknown
  source: /note="Description of Unknown: XCL1 sequence"
MRLLILALLGICSLTAYIVEGVGSEVSDKRTCVSLTTQRLPVSRIKTYTITEGSLRAVIFITKRGLKVCADPQATWVRDVVRSMDRKSNTRNNMIQTKPTGTQQSTNTAVTLTG

SEQ ID NO: 763 - protein, 114 aa, Unknown
  source: /note="Description of Unknown: XCL2 sequence"
MRLLILALLGICSLTAYIVEGVGSEVSHRRTCVSLTTQRLPVSRIKTYTITEGSLRAVIFITKRGLKVCADPQATWVRDVVRSMDRKSNTRNNMIQTKPTGTQQSTNTAVTLTG

SEQ ID NO: 764 - protein, 397 aa, Unknown
  source: /note="Description of Unknown: CX3CL1 sequence"
MAPISLSWLLRLATFCHLTVLLAGQHHGVTKCNITCSKMTSKIPVALLIHYQQNQASCGKRAIILETRQHRLFCADPKEQWVKDAMQHLDRQAAALTRNGGTFEKQIGEVKPRTTPAAGGMDESVVLEPEATGESSSLEPTPSSQEAQRALGTSPELPTGVTGSSGTRLPPTPKAQDGGPVGTELFRVPPVSTAATWQSSAPHQPGPSLWAEAKTSEAPSTQDPSTQASTASSPAPEENAPSEGQRVWGQGQSPRPENSLEREEMGPVPAHTDAFQDWGPGSMAHVSVVPVSSEGTPSREPVASGSWTPKAEEPIHATMDPQRLGVLITPVPDAQAATRRQAVGLLAFLGLLFCLGVAMFTYQSLQGCPRKMAGEMAEGLRYIPRSCGSNSYVLVPV

SEQ ID NO: 765 - protein, 223 aa, Unknown
  source: /note="Description of Unknown: Tbet sequence"
HLLWSKFNQHQTEMIITKQGRRMFPFLSFTVAGLEPTSHYRMFVDVVLVDQHHWRYQSGKWVQCGKAEGSMPGNRLYVHPDSPNTGAHWMRQEVSFGKLKLTNNKGASNNVTQMIVLQSLHKYQPRLHIVEVNEGEPETVCNASNTHIFTFQETQFIAVTAYQNAEITQLKIDNNPFAKGFRENFESMYASVDTSVPSPPGPNCQLLGGDPYSPLLSNQYPVP

SEQ ID NO: 766 - protein, 443 aa, Unknown
  source: /note="Description of Unknown: GATA3 sequence"
MEVTADQPRWVSHHHPAVLNGQHPDTHHPGLSHSYMDAAQYPLPEEVDVLFNIDGQGNHVPPYYGNSVRATVQRYPPTHHGSQVCRPPLLHGSLPWLDGGKALGSHHTASPWNLSPFSKTSIHHGSPGPLSVYPPASSSSLSGGHASPHLFTFPPTPPKDVSPDPSLSTPGSAGSARQDEKECLKYQVPLPDSMKLESSHSRGSMTALGGASSSTHHPITTYPPYVPEYSSGLFPPSSLLGGSPTGFGCKSRPKARSSTGRECVNCGATSTPLWRRDGTGHYLCNACGLYHKMNGQNRPLIKPKRRLSAARRAGTSCANCQTTTTTLWRRNANGDPVCNACGLYYKLHNINRPLTMKKEGIQTRNRKMSSKSKKCKKVHDSLEDFPKNSSFNPAALSRHMSSLSHISPFSHSSHMLTTPTPMHPPSSLSFGPHHPSSMVTAMG

SEQ ID NO: 767 - protein, 518 aa, Unknown
  source: /note="Description of Unknown: RORgt sequence"
MDRAPQRQHRASRELLAAKKTHTSQIEVIPCKICGDKSSGIHYGVITCEGCKGFFRRSQRCNAAYSCTRQQNCPIDRTSRNRCQHCRLQKCLALGMSRDAVKFGRMSKKQRDSLHAEVQKQLQQRQQQQQEPVVKTPPAGAQGADTLTYTLGLPDGQLPLGSSPDLPEASACPPGLLKASGSGPSYSNNLAKAGLNGASCHLEYSPERGKAEGRESFYSTGSQLTPDRCGLRFEEHRHPGLGELGQGPDSYGSPSFRSTPEAPYASLTEIEHLVQSVCKSYRETCQLRLEDLLRQRSNIFSREEVTGYQRKSMWEMWERCAHHLTEAIQYVVEFAKRLSGFMELCQNDQIVLLKAGAMEVVLVRMCRAYNADNRTVFFEGKYGGMELFRALGCSELISSIFDFSHSLSALHFSEDEIALYTALVLINAHRPGLQEKRKVEQLQYNLELAFHHHLCKTHRQSILAKLPPKGKLRSLCSQHVERLQIFQHLHPIVVQAAFPPLYKELFSTETESPVGLSK

SEQ ID NO: 768 - protein, 268 aa, Unknown
  source: /note="Description of Unknown: Cd25 sequence"
MEPCLLMWGILTFITVSGYTTDLCDDDPPNLKHATFKALTYKTGTVLNCDCERGFRRISSYMHCTGNSSHASWENKCQCKSISPENRKGKVTTKPEEQKGENPTEMQSQTPPMDEVDLVGHCREPPPWEHENSKRIYHFVVGQTLHYQCMQGFTALHRGPAKSICKTIFGKTRWTQPPLKCISESQFPDDEELQASTDAPAGRDTSSPFITTSTPDFHKHTEVATTMESFIFTTEYQIAVASCVLLLISIVLVSGLTWQRRRRKSRTI

SEQ ID NO: 769 - protein, 163 aa, Unknown
  source: /note="Description of Unknown: Skp1 sequence"
MPSIKLQSSDGEIFEVDVEIAKQSVTIKTMLEDLGMDDEGDDDPVPLPNVNAAILKKVIQWCTHHKDDPPPPEDDENKEKRTDDIPVWDQEFLKVDQGTLFELILAANYLDIKGLLDVTCKTVANMIKGKTPEEIRKTFNIKNDFTEEEEAQVRKENQWCEEK

SEQ ID NO: 770 - protein, 161 aa, Unknown
  source: /note="Description of Unknown: Spy sequence"
MRKLTALFVASTLALGAANLAHAADTTTAAPADAKPMMHHKGKFGPHQDMMFKDLNLTDAQKQQIREIMKGQRDQMKRPPLEERRAMHDIIASDTFDKAKAEAQIAKMEEQRKANMLAHMETQNKIYNILTPEQKKQFNANFEKRLTERPAAKGKMPATAE

SEQ ID NO: 771 - protein, 270 aa, Unknown
  source: /note="Description of Unknown: Fkpa sequence"
MKSLFKVTLLATTMAVALHAPITFAAEAAKPATAADSKAAFKNDDQKSAYALGASLGRYMENSLKEQEKLGIKLDKDQLIAGVQDAFADKSKLSDQEIEQTLQAFEARVKSSAQAKMEKDAADNEAKGKEYREKFAKEKGVKTSSTGLVYQVVEAGKGEAPKDSDTVVVNYKGTLIDGKEFDNSYTRGEPLSFRLDGVIPGWTEGLKNIKKGGKIKLVIPPELAYGKAGVPGIPPNSTLVFDVELLDVKPAPKADAKPEADAKAADSAKK

SEQ ID NO: 772 - protein, 428 aa, Unknown
  source: /note="Description of Unknown: Sura sequence"
MKNWKTLLLGIAMIANTSFAAPQVVDKVAAVVNNGVVLESDVDGLMQSVKLNAAQARQQLPDDATLRHQIMERLIMDQIILQMGQKMGVKISDEQLDQAIANIAKQNNMTLDQMRSRLAYDGLNYNTYRNQIRKEMIISEVRNNEVRRRITILPQEVESLAQQVGNQNDASTELNLSHILIPLPENPTSDQVNEAESQARAIVDQARNGADFGKLAIAHSADQQALNGGQMGWGRIQELPGIFAQALSTAKKGDIVGPIRSGVGFHILKVNDLRGESKNISVTEVHARHILLKPSPIMTDEQARVKLEQIAADIKSGKTTFAAAAKEFSQDPGSANQGGDLGWATPDIFDPAFRDALTRLNKGQMSAPVHSSFGWHLIELLDTRNVDKTDAAQKDRAYRMLMNRKFSEEAASWMQEQRASAYVKILSN

SEQ ID NO: 773 - protein, 566 aa, Unknown
  source: /note="Description of Unknown: Hsp60 sequence"
MLRVNSKSSIKTFVRHLSHKELKFGVEGRAALLKGVNTLADAVSVTLGPKGRNVLIEQQFGAPKITKDGVTVAKAITLEDKFEDLGAKLLQEVASKTNESAGDGTTSATVLGRSIFTESVKNVAAGCNPMDLRRGSQAAVEAVIEFLQKNKKEITTSEEIAQVATISANGDKHIGDLLANAMEKVGKEGVITVKEGKTLEDELEVTEGMKFDRGFISPYFITNTKTGKVEFENPLILLSEKKISSIQDILPSLELSNQTRRPLLIIAEDVDGEALAACILNKLRGQVQVCAVKAPGFGDNRKNTLGDIAILSGGTVFTEELDIKPENATIEQLGSAGAVTITKEDTVLLNGEGSKDNLEARCEQIRSVIADVHTTEYEKEKLQERLAKLSGGVAVIKVGGASEVEVGEKKDRYEDALNATRAAVEEGILPGGGTALIKATKILDEVKEKAVNFDQKLGVDTIRAAITKPAKRIIENAGEEGAVIVGKIYDEPEFNKGYDSQKGEFTDMIAAGIIDPFKVVKNGLVDASGVASLLATTECAIVDAPQPKGSPAAPPAPGMGGMPGMF

SEQ ID NO: 774 - protein, 705 aa, Unknown
  source: /note="Description of Unknown: Hsp70 sequence"
MAPAVGIDLGTTYSCVGIFRDDRIEIIANDQGNRTTPSFVAFTDTERLIGDAAKNQVAMNPANTVFDAKRLIGRKFADPEVQADMKHFPFKITDKGGKPVIQVEFKGETKEFTPEEISSMVLTKMRETAEAYLGGTVNNAVVTVPAYFNDSQRQATKDAGLIAGLNVLRIINEPTAAAIAYGLDKKADGERNVLIFDLGGGTFDVSLLTIEEGIFEVKSTAGDTHLGGEDFDNRLVNHFVSEFKRKFKKISPAERARALRRSPTACERAKRTLSSAAQTSIEIDSLYEGIDFYTSITRARFEELCQDLFRSTMEPVERVLRDAKIDKSSVHEIVLVGGSTRIPRIQKLVSDFFNGKEPNKSINPDEAVAYGAAVQAAILSGDTSSKSTNEILLLDVAPLSLGIETAGGVMTPLIKRNTTIPTKKSETFSTFSDNQPGVLIQVFEGERARTKDNNLLGKFELTGIPRARGVPQIEVTFDVDANGIMNVSALEKGTRKTNKIVITNDKGRLSKEEIERMLAEAEKYKAEDEAEASRIRPKNGLESYAYSLRNSLRHSKVDEKLEAGDKEKLKSEIDKTVQWLDENQTATKEEYESQQKELEAVANPIMMKFYAGGEGAPGGFPGAGGPGGFPGGPGAGHASGGGDDGPTVEEVDLKFPMLPLPWQLSVRKMHRPFFLFLLFLIFLIFLILFLFYFFLPVRFNESCFS

SEQ ID NO: 775 - protein, 548 aa, Unknown
  source: /note="Description of Unknown: GroEL sequence"
MAAKDVKFGNDARVKMLRGVNVLADAVKVTLGPKGRNVVLDKSFGAPTITKDGVSVAREIELEDKFENMGAQMVKEVASKANDAAGDGTTTATVLAQAIITEGLKAVAAGMNPMDLKRGIDKAVTAAVEELKALSVPCSDSKAIAQVGTISANSDETVGKLIAEAMDKVGKEGVITVEDGTGLQDELDVVEGMQFDRGYLSPYFINKPETGAVELESPFILLADKKISNIREMLPVLEAVAKAGKPLLIIAEDVEGEALATLVVNTMRGIVKVAAVKAPGFGDRRKAMLQDIATLTGGTVISEEIGMELEKATLEDLGQAKRVVINKDTTTIIDGVGEEAAIQGRVAQIRQQIEEATSDYDREKLQERVAKLAGGVAVIKVGAATEVEMKEKKARVEDALHATRAAVEEGVVAGGGVALIRVASKLADLRGQNEDQNVGIKVALRAMEAPLRQIVLNCGEEPSVVANTVKGGDGNYGYNAATEEYGNMIDMGILDPTKVTRSALQYAASVAGLMITTECMVTDLPKNDAADLGAAGGMGGMGGMGGMM

SEQ ID NO: 776 - protein, 97 aa, Unknown [sequence omitted]

SEQ ID NO: 777 - protein, 732 aa, Unknown
  source: /note="Description of Unknown: Hsp90-alpha sequence"
MPEETQTQDQPMEEEEVETFAFQAEIAQLMSLIINTFYSNKEIFLRELISNSSDALDKIRYESLTDPSKLDSGKELHINLIPNKQDRTLTIVDTGIGMTKADLINNLGTIAKSGTKAFMEALQAGADISMIGQFGVGFYSAYLVAEKVTVITKHNDDEQYAWESSAGGSFTVRTDTGEPMGRGTKVILHLKEDQTEYLEERRIKEIVKKHSQFIGYPITLFVEKERDKEVSDDEAEEKEDKEEEKEKEEKESEDKPEIEDVGSDEEEEKKDGDKKKKKKIKEKYIDQEELNKTKPIWTRNPDDITNEEYGEFYKSLTNDWEDHLAVKHFSVEGQLEFRALLFVPRRAPFDLFENRKKKNNIKLYVRRVFIMDNCEELIPEYLNFIRGVVDSEDLPLNISREMLQQSKILKVIRKNLVKKCLELFTELAEDKENYKKFYEQFSKNIKLGIHEDSQNRKKLSELLRYYTSASGDEMVSLKDYCTRMKENQKHIYYITGETKDQVANSAFVERLRKHGLEVIYMIEPIDEYCVQQLKEFEGKTLVSVTKEGLELPEDEEEKKKQEEKKTKFENLCKIMKDILEKKVEKVVVSNRLVTSPCCIVTSTYGWTANMERIMKAQALRDNSTMGYMAAKKHLEINPDHSIIETLRQKAEADKNDKSVKDLVILLYETALLSSGFSLEDPQTHANRIYRMIKLGLGIDEDDPTADDTSAAVTEEMPPLEGDDDTSRMEEVD

SEQ ID NO: 778 - protein, 624 aa, Unknown
  source: /note="Description of Unknown: HtpG sequence"
MKGQETRGFQSEVKQLLHLMIHSLYSNKEIFLRELISNASDAADKLRFRALSNPDLYEGDGELRVRVSFDKDKRTLTISDNGVGMTRDEVIDHLGTIAKSGTKSFLESLGSDQAKDSQLIGQFGVGFYSAFIVADKVTVRTRAAGEKPENGVFWESAGEGEYTVADITKEDRGTEITLHLREGEDEFLDDWRVRSIISKYSDHIALPVEIEKREEKDGETVISWEKINKAQALWTRNKSEITDEEYKEFYKHIAHDFNDPLTWSHNRVEGKQEYTSLLYIPSQAPWDMWNRDHKHGLKLYVQRVFIMDDAEQFMPNYLRFVRGLIDSSDLPLNVSREILQDSTVTRNLRNALTKRVLQMLEKLAKDDAEKYQTFWQQFGLVLKEGPAEDFANQEAIAKLLRFASTHTDSSAQTVSLEDYVSRMKEGQEKIYYITADSYAAAKSSPHLELLRKKGIEVLLLSDRIDEWMMNYLTEFDGKPFQSVSKVDESLEKLADEVDESAKEAEKALTPFIDRVKALLGERVKDVRLTHRLTDTPAIVSTDADEMSTQMAKLFAAAGQKVPEVKYIFELNPDHVLVKRAADTEDEAKFSEWVELLLDQALLAERGTLEDPNLFIRRMNQLLVS

SEQ ID NO: 779 - protein, 340 aa, Unknown
  source: /note="Description of Unknown: Hsp40 sequence"
MGKDYYQTLGLARGASDEEIKRAYRRQALRYHPDKNKEPGAEEKFKEIAEAYDVLSDPRKREIFDRYGEEGLKGSGPSGGSGGGANGTSFSYTFHGDPHAMFAEFFGGRNPFDTFFGQRNGEEGMDIDDPFSGFPMGMGGFTNVNFGRSRSAQEPARKKQDPPVTHDLRVSLEEIYSGCTKKMKISHKRLNPDGKSIRNEDKILTIEVKKGWKEGTKITFPKEGDQTSNNIPADIVFVLKDKPHNIFKRDGSDVIYPARISLREALCGCTVNVPTLDGRTIPVVFKDVIRPGMRRKVPGEGLPLPKTPEKRGDLIIEFEVIFPERIPQTSRTVLEQVLPI

SEQ ID NO: 780 - protein, 277 aa, Unknown
  source: /note="Description of Unknown: ClpP sequence"
MWPGILVGGARVASCRYPALGPRLAAHFPAQRPPQRTLQNGLALQRCLHATATRALPLIPIVVEQTGRGERAYDIYSRLLRERIVCVMGPIDDSVASLVIAQLLFLQSESNKKPIHMYINSPGGVVTAGLAIYDTMQYILNPICTWCVGQAASMGSLLLAAGTPGMRHSLPNSRIMIHQPSGGARGQATDIAIQAEEIMKLKKQLYNIYAKHTKQSLQVIESAMERDRYMSPMEAQEFGILDKVLVHPPQDGEDEPTLVQKEPVEAAPAAEPVPAST

SEQ ID NO: 781 - protein, 633 aa, Unknown
  source: /note="Description of Unknown: ClpX sequence"
MPSCGACTCGAAAVRLITSSLASAQRGISGGRIHMSVLGRLGTFETQILQRAPLRSFTETPAYFASKDGISKDGSGDGNKKSASEGSSKKSGSGNSGKGGNQLRCPKCGDLCTHVETFVSSTRFVKCEKCHHFFVVLSEADSKKSIIKEPESAAEAVKLAFQQKPPPPPKKIYNYLDKYVVGQSFAKKVLSVAVYNHYKRIYNNIPANLRQQAEVEKQTSLTPRELEIRRREDEYRFTKLLQIAGISPHGNALGASMQQQVNQQIPQEKRGGEVLDSSHDDIKLEKSNILLLGPTGSGKTLLAQTLAKCLDVPFAICDCTTLTQAGYVGEDIESVIAKLLQDANYNVEKAQQGIVFLDEVDKIGSVPGIHQLRDVGGEGVQQGLLKLLEGTIVNVPEKNSRKLRGETVQVDTTNILFVASGAFNGLDRIISRRKNEKYLGFGTPSNLGKGRRAAAAADLANRSGESNTHQDIEEKDRLLRHVEARDLIEFGMIPEFVGRLPVVVPLHSLDEKTLVQILTEPRNAVIPQYQALFSMDKCELNVTEDALKAIARLALERKTGARGLRSIMEKLLLEPMFEVPNSDIVCVEVDKEVVEGKKEPGYIRAPTKESSEEEYDSGVEEEGWPRQADAANS

SEQ ID NO: 782 - protein, 316 aa, Unknown
  source: /note="Description of Unknown: CDKN1C sequence"
MSDASLRSTSTMERLVARGTFPVLVRTSACRSLFGPVDHEELSRELQARLAELNAEDQNRWDYDFQQDMPLRGPGRLQWTEVDSDSVPAFYRETVQVGRCRLLLAPRPVAVAVAVSPPLEPAAESLDGLEEAPEQLPSVPVPAPASTPPPVPVLAPAPAPAPAPVAAPVAAPVAVAVLAPAPAPAPAPAPAPAPVAAPAPAPAPAPAPAPAPAPAPDAAPQESAEQGANQGQRGQEPLADQLHSGISGRPAAGTAAASANGAAIKKLSGPLISDFFAKRKRSAPEKSSGDVPAPCPSPSAAPGVGSVEQTPRKRLR

SEQ ID NO: 783 - protein, 200 aa, Unknown
  source: /note="Description of Unknown: BAX inhibitor sequence"
MNIFDRKINFDALLKFSHITPSTQQHLKKVYASFALCMFVAAAGAYVHMVTHFIQAGLLSALGSLILMIWLMATPHSHETEQKRLGLLAGFAFLTGVGLGPALEFCIAVNPSILPTAFMGTAMIFTCFTLSALYARRRSYLFLGGILMSALSLLLLSSLGNVFFGSIWLFQANLYVGLVVMCGFVLFDTQLIIEKAEHGD

SEQ ID NO: 784 - protein, 464 aa, Unknown
  source: /note="Description of Unknown: codA sequence"
MSNNALQTIINARLPGEEGLWQIHLQDGKISAIDAQSGVMPITENSLDAEQGLVIPPFVEPHIHLDTTQTAGQPNWNQSGTLFEGIERWAERKALLTHDDVKQRAWQTLKWQIANGIQHVRTHVDVSDATLTALKAMLEVKQEVAPWIDLQIVAFPQEGIQDYIWHCIDLFLDFITVFRKLMMILAMNEKDKKKEKKLSYPNGEALLEEALRLGADVVGAIPHFEFTREYGVESLHKTFALAQKYDRLIDVHCDEIDDEQSRFVETVAALAHHEGMGARVTASHTTAMHSYNGAYTSRLFRLLKMSGINFVANPLVNIHLQGRFDTYPKRRGITRVKEMLESGINVCFGHDDVFDPWYPLGTANMLQVLHMGLHVCQLMGYGQINDGLNLITHHSARTLNLQDYGIAAGNSANLIILPAENGFDALRRQVPVRYSVRGGKVIASTQPAQTTVYLEQPEAIDYKR

SEQ ID NO: 785 - protein, 42 aa, Artificial Sequence
  source: /note="Description of Artificial Sequence: Synthetic polypeptide"
KRGRKKLLYIFKQPFMRPVQTTQEEDGCSCRFPEEEEGGCEL

SEQ ID NO: 786 - protein, 112 aa, Artificial Sequence
  source: /note="Description of Artificial Sequence: Synthetic polypeptide"
RVKFSRSADAPAYKQGQNQLYNELNLGRREEYDVLDKRRGRDPEMGGKPRRKNPQEGLYNELQKDKMAEAYSEIGMKGERRRGKGHDGLYQGLSTATKDTYDALHMQALPPR

SEQ ID NO: 787 - protein, 241 aa, Artificial Sequence
  source: /note="Description of Artificial Sequence: Synthetic polypeptide"
QVQLVQSGAEVEKPGASVKVSCKASGYTFTDYYMHWVRQAPGQGLEWMGWINPNSGGTNYAQKFQGRVTMTRDTSISTAYMELSRLRSDDTAVYYCASGWDFDYWGQGTLVTVSSGGGGSGGGGSGGGGSGGGGSDIVMTQSPSSLSASVGDRVTITCRASQSIRYYLSWYQQKPGKAPKLLIYTASILQNGVPSRFSGSGSGTDFTLTISSLQPEDFATYYCLQTYTTPDFGPGTKVEIK

SEQ ID NO: 788 - protein, 120 aa, Artificial Sequence
  source: /note="Description of Artificial Sequence: Synthetic polypeptide"
EVKLQESGPGLVAPSQSLSVTCTVSGVSLPDYGVSWIRQPPRKGLEWLGVIWGSETTYYNSALKSRLTIIKDNSKSQVFLKMNSLQTDDTAIYYCAKHYYYGGSYAMDYWGQGTSVTVSS

SEQ ID NO: 789 - protein, 107 aa, Artificial Sequence
  source: /note="Description of Artificial Sequence: Synthetic polypeptide"
DIQMTQTTSSLSASLGDRVTISCRASQDISKYLNWYQQKPDGTVKLLIYHTSRLHSGVPSRFSGSGSGTDYSLTISNLEQEDIATYFCQQGNTLPYTFGGGTKLEIT

SEQ ID NO: 790 - protein, 218 aa, Artificial Sequence
  source: /note="Description of Artificial Sequence: Synthetic polypeptide"
EIVLTQSPATLSLSPGERATLSCRASKGVSTSGYSYLHWYQQKPGQAPRLLIYLASYLESGVPARFSGSGSGTDFTLTISSLEPEDFAVYYCQHSRDLPLTFGGGTKVEIKRTVAAPSVFIFPPSDEQLKSGTASVVCLLNNFYPREAKVQWKVDNALQSGNSQESVTEQDSKDSTYSLSSTLTLSKADYEKHKVYACEVTHQGLSSPVTKSFNRGEC

SEQ ID NO: 791 - RNA, 80 nt, Artificial Sequence
  source: /note="Description of Artificial Sequence: Synthetic oligonucleotide"
  source: /note="See specification as filed for detailed description of substitutions and preferred embodiments"
aaaaaaaaaaaaaaaaaaaaaaaaaaaaaaaaaaaaaaaaaaaaaaaaaaaaaaaaaaaaaaaaaaaaaaaaaaaaaaaa

SEQ ID NO: 792 - protein, 5 aa, Artificial Sequence
  source: /note="Description of Artificial Sequence: Synthetic peptide"
GGGGS

SEQ ID NO: 793 - protein, 15 aa, Artificial Sequence
  source: /note="Description of Artificial Sequence: Synthetic peptide"
GGGGSGGGGSGGGGS
